(19) United States
(12) Patent Application Publication
(10) Pub. No.: US 2025/0161494 A1
(43) Pub. Date: May 22, 2025

(54) TRANSMEMBRANE RECEPTOR GENE EDITING

(71) Applicant: ORTHOBIO THERAPEUTICS, INC., Vail, CO (US)

(72) Inventors: Peter J. Millet, Edwards, CO (US); Iain Alasdair Russell, Cambridge (GB); Matthew J. Allen, Swaffham Bulbeck (GB); George Gentsch, Cambridge (GB)

(21) Appl. No.: 18/729,791

(22) PCT Filed: Jan. 19, 2023
(86) PCT No.: PCT/US2023/060939

§ 371 Date: Jul. 17, 2024

Related U.S. Application Data
(60) Provisional application No. 63/301,033, filed on Jan. 19, 2022.
(60) Provisional application No. 63/390,222, filed on Jul. 18, 2022.

(51) Int. Cl. A61K 48/00; C12N 9/22; C12N 15/11; C12N 15/86

(52) U.S. Cl. CPC A61K 48/0058; C12N 9/22; C12N 15/11; C12N 15/86; C12N 2310/20; C12N 2750/14143

(57) ABSTRACT

Provided herein are compositions and methods for ablating intracellular signaling through specific cell surface receptors as means of treatment for various conditions of a pro-inflammatory character. In some aspects, the compositions and methods are to prevent the progression of osteoarthritis and other arthritides and to treat osteoarthritis and other arthritides in a mammalian joint. In some aspects, the compositions and method are for treating or preventing localized nociception, inflammation, degeneration, or morphological changes associated with back or spine conditions or disorders.

### CROSS REFERENCE TO RELATED APPLICATIONS

[0001] This application claims priority to U.S. Provisional Patent Application No. 63/301,033, filed Jan. 19, 2022, U.S. Provisional Patent Application No. 63/303,479, filed Jan. 26, 2022, and U.S. Provisional Patent Application No. 63/390,222, filed Jul. 18, 2022, the contents of which are hereby incorporated by reference herein, in their entireties, for all purposes.

### BACKGROUND OF THE INVENTION

[0002] Receptor-ligand interactions are responsible for transmission of various signals across the plasma membrane of a receptor-expressing cell. In most instances, a circulating ligand will bind to a particular receptor anchored into cellular membrane (with or without co-receptors), which, by different mechanisms and often through activity of the receptor's cytoplasmic domain, results in the transduction of signaling pathways from the cell surface to the interior. Such signaling events can, in turn, impact a variety of cellular activities, including modulation of expression of various gene products that can further impact cellular functions.

[0003] The ubiquity of the receptor-ligand paradigm in cellular biology means that numerous diseases, illnesses, and conditions are caused, wholly or in part, by aberrant or excessive signaling through various cellular receptors, and various approaches have been utilized to address this. Small and large molecules can be used to disrupt receptor-ligand interactions, though issues of off-target effects and potential immunogenicity remain.

[0004] More recently, genetic approaches have been explored to either transiently reduce (i.e., knockdown), e.g., in the case of siRNA, or permanently ablate (i.e., genetic knockout), the expression of a given ligand or receptor. In both instances, such reduction or ablation can result in ‘leakiness.’ For example, a lower-affinity receptor may bind ligand present in excess in the absence of the native receptor, or conversely, unoccupied receptors may bind other ligands in absence of its native ligand. In either instance, this leakiness can result in additional issues at the organismal level. Therefore, more advanced genetic tools are needed to address the myriad of diseases, illnesses and conditions without the leakiness observed with traditional genetic knockdown or knockout.

### BRIEF SUMMARY OF THE INVENTION

[0005] Provided herein are compositions and methods for silencing the signaling functionality of one or more cellular receptors in an animal in need thereof to treat a disease, illness or condition caused by aberrant or excessive signaling through said receptor.

[0006] In some embodiments, receptor signaling is silenced by CRISPR editing of the gene encoding the receptor. In some embodiments, the CRISPR editing results in ablation of a transmembrane domain (e.g., generation of soluble decoy receptor). In some embodiments, the CRISPR editing results in ablation of a cytoplasmic domain (e.g., generation of a membrane-bound decoy receptor). In some embodiments, the CRISPR editing results targets the extracellular domain (e.g., generation of a complete knock out).

[0007] In contrast to complete ablation or transient knockdown of gene expression of a receptor or ligand, which has been associated with potentially important off-target effects and leakiness, the targeting of a receptor's transmembrane domain or cytoplasmic domain, as described herein, comprises a novel approach for blocking intracellular signaling of one or more receptor-ligand interactions without the issues of excess ligand or unoccupied receptors to contribute to more deleterious outcomes.

### BRIEF DESCRIPTION OF THE DRAWINGS

[0008] The presently disclosed embodiments will be further explained with reference to the attached drawings. The drawings shown are not necessarily to scale, with emphasis instead generally being placed upon illustrating the principles of the presently disclosed embodiments.

[0009] FIG. 1 illustrates the exons to be edited by CRISPR methods herein described to generate the indicated type of interference (e.g., genetic knockout, soluble decoy receptor, or membrane-bound decoy receptor) for the indicated exemplary gene targets.

[0010] FIGS. 2A and 2B illustrate the different types of CRISPR edits to (A) canine IL1RAP gene and (B) human TNFRSF4 gene. For cIL1RAP, the splicing map at top indicates which exons are edited with sgRNA shown, aligned with the corresponding domains in the full length cIL1RAP protein, such that OCP02 edits in the ectodomain, OCP07 edits in the transmembrane domain, and OCP10 edits in the TIR domain (bottom). For TNFRSF4, the splicing map at bottom is labeled with the encoded protein domains and aligned with the sgRNA binding sites and the interference type generated. For instance, those sgRNAs that generate soluble decoy receptors cluster within the area encoding the transmembrane domain, while those generating transmembrane decoy receptors cluster within the encoded cytoplasmic domain and ablate the TRAF binding sites. In either case, synthesis of the ectodomain is unimpacted, allowing binding of the ligand.

[0011] FIGS. 3A and 3B illustrate a non-exhaustive list of disease states associated with IL1R1 and IL1RAP activity.

[0012] FIGS. 4A and 4B illustrate a non-exhaustive list of disease states associated with (A) IL6R and (B) IL6ST activity.

[0013] FIG. 5 illustrates a non-exhaustive list of disease states associated with TNFRSF1A activity.

[0014] FIG. 6 illustrates a non-exhaustive list of disease states associated with TNFRSF1B activity.

[0015] FIG. 7 illustrates a non-exhaustive list of disease states associated with TNFRSF3 activity.

[0016] FIG. 8 illustrates a non-exhaustive list of disease states associated with TNFRSF4 activity.

[0017] FIG. 9 illustrates a non-exhaustive list of disease states associated with TNFRSF11A activity.

[0018] FIGS. 10A and 10B illustrate a non-exhaustive list of disease states associated with (A) TGFRB1 and (B) TGFBR2 activity.

[0019] FIGS. 11A and 11B illustrate the design of exemplary sgRNAs that target canine IL1R1, including (A) a summary of select sgRNAs based on off-target risks, on-target efficacy, and frameshift likelihood and (B) AlphaFold2 models of wild-type and decoy IL1R1 receptors, as predicted to be generated by OCR13 and OCR14.

[0020] FIG. 12 illustrates the in vitro performance of the tested sgRNA candidates that target canine IL1RAP, as deduced from Sanger traces. ND, not determined.

[0021] FIGS. 13A, 13B, 13C, and 13D illustrate the effect of various Cas9 variants on the in-vitro editing performance of select candidate sgRNAs that target canine IL1R1.

[0022] FIGS. 14A and 14B illustrate the design of exemplary sgRNAs that target canine IL1RAP, including (A) a summary of select sgRNAs based on off-target risks, on-target efficiency and frameshift likelihood and (B) AlphaFold2-predicted models of the 3D structure of normal and OCP07-edited IL1RAP.

[0023] FIG. 15 illustrates the in vitro performance of the tested sgRNA candidates that target canine IL1RAP, as deduced from Sanger traces.

[0024] FIGS. 16A, 16B, 16C illustrate (A) select sgRNAs targeting IL1RAP for testing and their editing efficacy with wildtype Cas9, (B) the effect of the indicated Cas9 variants on editing efficacy in canine monocytes and (C) a comparison of editing efficacy between AR-Cas9 and WT-Cas9 in canine synovial fibroblasts.

[0025] FIGS. 17A, 17B, and 17C illustrate the editing efficacy of the indicated IL1RAP-directed sgRNAs in (A) canine monocytes, (B) canine chondrocytes and (C) canine synovial fibroblasts.

[0026] FIG. 18 illustrates the impact of IL1R1 editing on silencing transcriptional induction of PTGS2 in response to 4 hours exposure to IL1β in canine synoviocytes.

[0027] FIG. 19 illustrates the impact of IL1R1 editing on silencing transcriptional induction of IL6 in response to 4 hours exposure to IL1β in canine synoviocytes.

[0028] FIG. 20 illustrates the experimental design underlying transcriptome analyses, among other assays. Generally, IL1β treatment will induce pro-inflammatory signaling exclusively through the IL1 receptor, whereas MSU crystals and LPS trigger inflammation by different means (in addition to inducing IL1 signaling).

[0029] FIGS. 21A and 21B illustrate the transcriptional upregulation of PTGS2 (COX-2) in wild type control and IL1RAP-edited canine monocytes at (A) 4 and (B) 24 hours of exposure to LPS (1 ug/ml), IL1β (100 pM), MSU crystals (400 μg/ml), and PBS (1×).

[0030] FIGS. 22A and 22B illustrate the impact of IL1RAP editing on silencing transcriptional induction of PTGS2 in (A) canine chondrocytes and (B) canine synoviocytes in response to 4 hours exposure to IL1β.

[0031] FIGS. 23A and 23B illustrate luciferase activity levels (RLU) of (A) canine synovial fibroblasts at 8 hours and (B) canine chondrocytes at 24 hours post exposure to luciferase mRNA containing LNPs at the indicated concentration.

[0032] FIGS. 24A and 24B illustrate results of synovial fluid cytology assays collected (A) at baseline and (B) at 4 weeks after injection of saline, low dose LNP formulation A and low-dose LNP formulation B.

[0033] FIGS. 25A, 25B, 25C, 25D, 25E, 25F, 25G, and 25H collectively illustrate, for control and IL1RAP-edited cells, (A) a principal component analysis plot of normalized gene counts following IL1β or MSU treatment. Two heatmaps of select gene expression as result of (B) IL1β or (C) MSU treatment, and Venn diagrams of upregulated or downregulated genes following (D, E) IL1β or (F, G) MSU treatment. (H) Transcriptome analysis of the top 500 IL1B-responsive genes in IL1RAP-edited canine monocytes DH82.

[0034] FIGS. 26A, 26B, 26C, 26D, 26E, and 26F collectively illustrate SEQ ID NOs: 680-824 (A-D) the crRNA sequences generated by the bioinformatic methods herein described that target human IL1R1 to generate a genetic knockout, a soluble decoy receptor, a membrane-bound decoy receptor, or other form and (E-H) additional information regarding the chromosome 2 genomic coordinates (assembly hg38) of the bound DNA, DNA strand targeted, exon targeted, and several predicted performance metrics.

[0035] FIGS. 27A, 27B, 27C, 27D, 27E, 27F, 27G, and 27H collectively illustrate SEQ ID NOs: 825-892 and SEQ ID NOs: 3336-3420 (A-D) the crRNA sequences generated by the bioinformatic methods herein described that target canine IL1R1 to generate a genetic knockout, a soluble decoy receptor, or a membrane-bound decoy receptor, or other form and (E-H) additional information includes the chromosome 10 genomic coordinates (assembly canFam3) of the bound DNA, the DNA strand targeted, the exon targeted, and several predicted performance metrics.

[0036] FIGS. 28A, 28B, and 28C collectively illustrate SEQ ID NOs: 893-967, the crRNA sequences generated by the bioinformatic methods herein described that target equine IL1R1 to generate (A) a genetic knockout, (B) a soluble decoy receptor, or (C) a membrane-bound decoy receptor. Additional information includes the chromosome 15 genomic coordinates (assembly equCab3) of the bound DNA, the DNA strand targeted, the exon targeted, and several predicted performance metrics.

[0037] FIGS. 29A, 29B, and 29C collectively illustrate SEQ ID NOs: 968-1039, the crRNA sequences generated by the bioinformatic methods herein described that target feline IL1R1 to generate (A) a genetic knockout, (B) a soluble decoy receptor, or (C) a membrane-bound decoy receptor. Additional information includes the chromosome A3 genomic coordinates (assembly felCat9) of the bound DNA, the DNA strand targeted, the exon targeted, and several predicted performance metrics.

[0038] FIGS. 30A, 30B, 30C, 30D, 30E, 30F, 30G, and 30H collectively illustrate SEQ ID NOs: 1040-1203, (A-D) the crRNA sequences generated by the bioinformatic methods herein described that target human IL1RAP to generate a genetic knockout, a soluble decoy receptor, a membrane-bound decoy receptor or other form and (E-H) additional information regarding the chromosome 3 genomic coordinates (assembly hg38) of the bound DNA, DNA strand targeted, exon targeted, and several predicted performance metrics.

[0039] FIGS. 31A, 31B, 31C, 31D, 31E, and 31F collectively illustrate SEQ ID NOs: 1204-1271 and SEQ ID NOs: 3421-3490 (A-C) the crRNA sequences generated by the bioinformatic methods herein described that target canine IL1RAP to generate a genetic knockout, a soluble decoy receptor, a membrane-bound decoy receptor, or other form and (D-F) additional information includes the chromosome 34 genomic coordinates (assembly canFam3) of the bound DNA, the DNA strand targeted, the exon targeted, and several predicted performance metrics.

[0040] FIGS. 32A, 32B, and 32C collectively illustrate SEQ ID NOs: 1272-1348, the crRNA sequences generated by the bioinformatic methods herein described that target equine IL1RAP to generate (A) a genetic knockout, (B) a soluble decoy receptor, or (C) a membrane-bound decoy receptor. Additional information includes the chromosome 19 genomic coordinates (assembly equCab3) of the bound DNA, the DNA strand targeted, the exon targeted, and several predicted performance metrics.

[0041] FIGS. 33A, 33B, and 33C collectively illustrate SEQ ID NOs: 1349-1424, the crRNA sequences generated by the bioinformatic methods herein described that target feline IL1RAP to generate (A) a genetic knockout, (B) a soluble decoy receptor, or (C) a membrane-bound decoy receptor. Additional information includes where the chromosome C2 genomic coordinates (assembly felCat9) bound, DNA strand targeted, exon targeted, and several predicted performance metrics.

[0042] FIGS. 34A, 34B, 34C, 34D, 34E, and 34F collectively illustrate SEQ ID NOs: 1425-1546, (A-C) the crRNA sequences generated by the bioinformatic methods herein described that target human TGFBR1 to generate a genetic knockout, a soluble decoy receptor, a membrane-bound decoy receptor or other form and (D-F) additional information regarding the chromosome 9 genomic coordinates (assembly hg38) of the bound DNA, DNA strand targeted, exon targeted, and several predicted performance metrics.

[0043] FIGS. 35A, 35B, 35C, 35D, 35E, 35F, 35G, and 35H collectively illustrate SEQ ID NOs: 1547-1745, (A-E) the crRNA sequences generated by the bioinformatic methods herein described that target human TGFBR2 to generate a genetic knockout, a soluble decoy receptor, a membrane-bound decoy receptor or other form and (F-J) additional information regarding the chromosome 3 genomic coordinates (assembly hg38) of the bound DNA, DNA strand targeted, exon targeted, and several predicted performance metrics.

[0044] FIGS. 36A, 36B, 36C, 36D, 36E, 36F, 36G, 36H, 36I, and 36J collectively illustrate SEQ ID NOs: 1746-1968, (A-E) the crRNA sequences generated by the bioinformatic methods herein described that target human IL6R to generate a genetic knockout, a soluble decoy receptor, a membrane-bound decoy receptor or other form and (F-J) additional information regarding the chromosome 1 genomic coordinates (assembly hg38) of the bound DNA, DNA strand targeted, exon targeted, and several predicted performance metrics.

[0045] FIGS. 37A, 37B, 37C, 37D, 37E, 37F, 37G, 37H, 37I, and 37J collectively illustrate SEQ ID NOs: 1969-2178, (A-E) the crRNA sequences generated by the bioinformatic methods herein described that target human IL6ST to generate a genetic knockout, a soluble decoy receptor, a membrane-bound decoy receptor or other form and (F-J) additional information regarding the chromosome 5 genomic coordinates (assembly hg38) of the bound DNA, DNA strand targeted, exon targeted, and several predicted performance metrics.

[0046] FIGS. 38A, 38B, 38C, 38D, 38E, 38F, 38G, 38H, 38I, and 38J collectively illustrate SEQ ID NOs: 2179-2395, (A-E) the crRNA sequences generated by the bioinformatic methods herein described that target human TNFRSF1A to generate a genetic knockout, a soluble decoy receptor, a membrane-bound decoy receptor or other form (F-J) additional information regarding the chromosome 12 genomic coordinates (assembly hg38) of the bound DNA, DNA strand targeted, exon targeted, and several predicted performance metrics.

[0047] FIGS. 39A, 39B, 39C, 39D, 39E, 39F, 39G, 39H, 39I, and 39J collectively illustrate SEQ ID NOs: 2396-2642, (A-E) the crRNA sequences generated by the bioinformatic methods herein described that target human TNFRSF1B to generate a genetic knockout, a soluble decoy receptor, a membrane-bound decoy receptor or other form and (F-J) additional information regarding the chromosome 1 genomic coordinates (assembly hg38) of the bound DNA, DNA strand targeted, exon targeted, and several predicted performance metrics.

[0048] FIGS. 40A, 40B, 40C, 40D, 40E, 40F, 40G, 40H, 40I, and 40J collectively illustrate SEQ ID NOs: 2643-2866, (A-E) the crRNA sequences generated by the bioinformatic methods herein described that target human TNFRSF3 to generate a genetic knockout, a soluble decoy receptor, a membrane-bound decoy receptor or other form and (F-J) additional information regarding the chromosome 12 genomic coordinates (assembly hg38) of the bound DNA, DNA strand targeted, exon targeted, and several predicted performance metrics.

[0049] FIGS. 41A, 41B, 41C, 41D, 41E, 41F, 41G, and 41H collectively illustrate SEQ ID NOs: 2867-3041, (A-D) the crRNA sequences generated by the bioinformatic methods herein described that target human TNFRSF4 to generate a genetic knockout, a soluble decoy receptor, a membrane-bound decoy receptor or other form and (E-H) additional information regarding the chromosome 1 genomic coordinates (assembly hg38) of the bound DNA, DNA strand targeted, exon targeted, and several predicted performance metrics.

[0050] FIGS. 42A, 42B, 42C, 42D, 42E, 42F, 42G, 42H, 42I, 42J, 42K, and 42L collectively illustrate SEQ ID NOs: 3042-3335, (A-F) the crRNA sequences generated by the bioinformatic methods herein described that target human TNFRSF11A to generate a genetic knockout, a soluble decoy receptor, a membrane-bound decoy receptor or other form and (G-L) additional information regarding the chromosome 18 genomic coordinates (assembly hg38) of the bound DNA, DNA strand targeted, exon targeted, and several predicted performance metrics.

[0051] FIGS. 43A and 43B illustrate (A) a schematic view showing the targeted domains of TGFBR1 and the orientation of various sgRNAs predicted to generate knockouts, membrane-bound decoy receptors, and soluble decoy receptors (ECD: Extracellular Domain; TMD: Transmembrane Domain; ICD: Intracellular Domain; GSM: GS rich Motif); and (B) a set of parameters considered for designing sgRNAs against TGFBR1, as well as example crRNA sequences.

[0052] FIGS. 44A and 44B illustrate (A) a schematic view showing the targeted domains of TGFBR2 and the orientation of various sgRNAs predicted to generate knockouts, membrane-bound decoy receptors, and soluble decoy receptors (ECD: Extracellular Domain; TMD: Transmembrane Domain; ICD: Intracellular Domain; GSM: GS rich Motif); and (B) a set of parameters considered for designing sgRNAs against TGFBR2, as well as example crRNA sequences.

[0053] FIGS. 45A and 45B show a summary of the efficiency for editing the human TGFBR1 gene in THP-1 cells using the identified guides and (A) wild type SpCas9 or (B) ARCas9.

[0054] FIGS. 46A and 46B show a summary of the efficiency for editing the human TGFBR2 gene in THP-1 cells using the identified guides and (A) wild type SpCas9 or (B) ARCas9.

[0055] FIGS. 47A, 47B, 47C, and 47D illustrate relative levels of (A, C) TGFB1 and (B, D) TIMP1 gene expression in THP-1 cells that are unedited (WT) or edited to knock out TGFB1 (OHTG), TGFBR1 (OHTIR), or TGFBR2 (OHTIIR) following challenge by LPS (panels A and B) or TGF-beta (panels C and D) for 6 hours.

[0056] FIGS. 48A, 48B, 48C, 48D, 48E, 48F, 48G, 48H, 48I, 48J, and 48K collectively illustrate human-directed crRNA sequences targeting (A) hIL1R1 (SEQ ID NOs: 3491-3513), (B) hIL1RAP (SEQ ID NOs: 3514-3543), (C) hIL6R (SEQ ID NOs: 3544-3566), (D) hIL6ST (SEQ ID NOs: 3567-3606), (E) hTNFRSF1A (SEQ ID NOs: 3607-3647), (F) hTNFRSF1B (SEQ ID NOs: 3648-3692), (G) hTNFRSF3 (SEQ ID NOs: 3693-3713), (H) hTNFRSF4 (SEQ ID NOs: 3714-3740), (I) hTNFRSF11A (SEQ ID NOs: 3741-3788), (J) hTGFBR1 (SEQ ID NOs: 3789-3813), and (K) hTGFBR2 (SEQ ID NOs: 3814-3865) for use in sgRNAs to validate in vitro editing with different modes of delivery.

### DETAILED DESCRIPTION OF THE INVENTION

### I. Introduction

[0057] Provided herein are compositions and methods for silencing the signaling functionality of one or more cellular receptors in an animal in need thereof to treat a disease, illness or condition caused by aberrant or excessive signaling through said receptor.

[0058] In some embodiments, receptor signaling is silenced by CRISPR editing of the gene encoding the receptor. In some embodiments, the CRISPR editing results in ablation of a transmembrane domain (i.e., generation of a soluble decoy receptor). In some embodiments, the CRISPR editing results in ablation of a cytoplasmic domain (i.e., generation of a membrane-bound decoy receptor).

### II. Definitions

[0059] Unless defined otherwise, all technical and scientific terms used herein have the same meaning as is commonly understood by one of skill in the art to which this invention belongs. All patents and publications referred to herein are incorporated by reference in their entireties.

[0060] The terms “Interleukin 1 receptor type 1” or “IL1R1” refer to the genes (NCBI Gene ID: 3554 [human], NCBI Gene ID: 481328 [canine], NCBI Gene ID: 100009699 [equine], NCBI Gene ID: 101080705 [feline]) or an encoded gene product (e.g., UniProt: P14778; NP_001307909.1 [human], XP_038536135.1 [canine], NP_001075263.2 [equine], XP_023107327.2 [feline]), as well as sequence variants, proteins harboring conservative amino acid substitutions, and glycoforms thereof. Canonically, the proteins encoded by the genes listed above are capable of binding all forms of the pro-inflammatory cytokine interleukin 1 (IL1 or IL1) to mediate interleukin-1-dependent activation of NF-kappa-B, MAPK and other signaling pathways. This intracellular signaling involves the recruitment of adapter molecules such as TOLLIP, MYD88, and IRAK1 or IRAK2 via TIR-TIR interactions with the cytoplasmic domains of receptor/coreceptor subunits. IL1R1 can also bind the Interleukin 1 receptor antagonist (IL1Ra or IL1Ra or IL1RN), which prevents association with IL1RAP to form a signaling-competent complex. In some instances, and merely for the sake of disambiguation, a prefix is added when referring to the protein or gene of a particular species (with h, c, e, and f, referring to the human, canine, equine, and feline forms, respectively).

[0061] In certain embodiments, any region of an IL1R1 gene (e.g., 5′ untranslated region [UTR], exon 1, exon 2, exon 3, exon 4, exon 5, exon 6, exon 7, exon 8, exon 9, exon 10, exon 11, exon 12, exon 13, exon 14, exon 15, exon 16, exon 17, exon 18, exon 19, exon 20, exon 21, any intervening intronic regions, intron/exon junctions, the 3′ UTR, or polyadenylation signal) is targeted by an RNA-guided nuclease to alter the gene. In some embodiments, the IL1R1 gene targeted by an RNA-guided nuclease is from a mammal. In some embodiments, the IL1R1 gene targeted by an RNA-guided nuclease is from a human (hIL1R1). In some embodiments, the IL1R1 gene targeted by an RNA-guided nuclease is from a dog (cIL1R1). In some embodiments, the IL1R1 gene targeted by an RNA-guided nuclease is from a horse (eIL1R1). In some embodiments, the IL1R1 gene targeted by an RNA-guided nuclease is from a cat (fIL1R1).

[0062] The terms “Interleukin 1 Receptor Accessory Protein,” “IL1RAP,” or “IL1RAP” refer to the genes (NCBI Gene ID: 3556 [human], NCBI Gene ID: 488126 [canine], NCBI Gene ID: 100068726 [equine], NCBI Gene ID: 101094125 [feline]) or an encoded gene product (e.g., UniProt: Q9NPH3; NP_002173.1 [human], XP_038318680.1 [canine], XP_001498597.2 [equine], XP_044893081.1 [feline]), as well as sequence variants, proteins harboring conservative amino acid substitutions, and glycoforms thereof. Canonically, the proteins encoded by the genes listed above are capable of associating with IL1R1 bound to IL1 to form the high affinity interleukin-1 receptor complex that mediates interleukin-1-dependent activation of NF-kappa-B and other signaling pathways through the recruitment of adapter molecules such as TOLLIP, MYD88, and IRAK1 or IRAK2 via TIR-TIR interactions with the cytoplasmic domains of receptor/coreceptor subunits. In some instances, and merely for the sake of disambiguation, a prefix is added when referring to the protein or gene of a particular species (with h, c, e, and f, referring to the human, canine, equine, and feline forms, respectively).

[0063] In certain embodiments, any region of an IL1RAP gene (e.g., 5′ untranslated region [UTR], exon 1, exon 2, exon 3, exon 4, exon 5, exon 6, exon 7, exon 8, exon 9, exon 10, exon 11, exon 12, exon 13, exon 14, exon 15, exon 16, exon 17, any intervening intronic regions, intron/exon junctions, the 3′ UTR, or polyadenylation signal) is targeted by an RNA-guided nuclease to alter the gene (see, e.g., FIG. 2A). In some embodiments, the IL1RAP gene targeted by an RNA-guided nuclease is from a mammal. In some embodiments, the IL1RAP gene targeted by an RNA-guided nuclease is from a human (hIL1RAP). In some embodiments, the IL1RAP gene targeted by an RNA-guided nuclease is from a dog (cIL1RAP). In some embodiments, the IL1RAP gene targeted by an RNA-guided nuclease is from a horse (eIL1RAP). In some embodiments, the IL1RAP gene targeted by an RNA-guided nuclease is from a cat (fIL1RAP).

[0064] The term “interleukin-1 receptor complex” or “IL1R complex” refers to any number of the protein receptors that comprises the family of transmembrane protein receptors responsible for transmitting or modulating intracellular signaling via binding of the pro-inflammatory cytokine interleukin 1 (IL1). These members include IL1R1, IL1R2, which primarily functions as a decoy receptor, IL1RAP, and IL1RL1, which can complex with other family members in the IL33 or IL36 signaling system.

[0065] The terms “Transforming Growth Factor Beta Receptor 1” or “TGFBR1” refer to the genes (NCBI Gene ID: 7046 [human], NCBI Gene ID: 481628 [canine], NCBI Gene ID: 100034117 [equine], NCBI Gene ID: 101094057 [feline]) or an encoded gene product (e.g., UniProt: P36897; NP_004603.1 [human], XP_038538191.1 [canine], XP_023485510.1 [equine], XP_023098269.1 [feline]), as well as sequence variants, proteins harboring conservative amino acid substitutions, and glycoforms thereof. Canonically, the proteins encoded by the genes listed above are transmembrane serine/threonine kinases forming, with TGFBR2, the native receptor for the TGF-beta cytokines TGFB1, TGFB2 and TGFB3. When bound to its ligand, TGFBR1 is phosphorylated by TGFBR2, activating intracellular signaling regulating multiple physiological and pathological processes through release of SMAD2, which can then translocate to the nucleus or activation of other cytoplasmic signaling mediators. In some instances, and merely for the sake of disambiguation, a prefix is added when referring to the protein or gene of a particular species (with h, c, e, and f, referring to the human, canine, equine, and feline forms, respectively).

[0066] In certain embodiments, any region of an TGFBR1 gene (e.g., 5′ untranslated region [UTR], exon 1, exon 2, exon 3, exon 4, exon 5, exon 6, exon 7, exon 8, exon 9, exon 10, exon 11, exon 12, any intervening intronic regions, intron/exon junctions, the 3′ UTR, or polyadenylation signal) is targeted by an RNA-guided nuclease to alter the gene. In some embodiments, the TGFBR1 gene targeted by an RNA-guided nuclease is from a mammal. In some embodiments, the TGFBR1 gene targeted by an RNA-guided nuclease is from a human (hTGFBR1). In some embodiments, the TGFBR1 gene targeted by an RNA-guided nuclease is from a dog (cTGFBR1). In some embodiments, the TGFBR1 gene targeted by an RNA-guided nuclease is from a horse (eTGFBR1). In some embodiments, the TGFBR1 gene targeted by an RNA-guided nuclease is from a cat (fTGFBR1).

[0067] The terms “Transforming Growth Factor Beta Receptor 2” or “TGFBR2” refer to the genes (NCBI Gene ID: 7048 [human], NCBI Gene ID: 477039 [canine], NCBI Gene ID: 100033860 [equine], NCBI Gene ID: 101091725 [feline]) or an encoded gene product (e.g., UniProt: P37173; NP_003233.4 [human], XP_038288013.1 [canine], XP_023475502.1 [equine], XP_023116415.1 [feline]), as well as sequence variants, proteins harboring conservative amino acid substitutions, and glycoforms thereof Canonically, the proteins encoded by the genes listed above are transmembrane serine/threonine kinases forming, with TGFBR2, the native receptor for the TGF-beta cytokines TGFB1, TGFB2 and TGFB3. When bound to its ligand, TGFBR1 is phosphorylated by TGFBR2, activating intracellular signaling regulating multiple physiological and pathological processes through release of SMAD2, which can then translocate to the nucleus or activation of other cytoplasmic signaling mediators. In some instances, and merely for the sake of disambiguation, a prefix is added when referring to the protein or gene of a particular species (with h, c, e, and f, referring to the human, canine, equine, and feline forms, respectively).

[0068] In certain embodiments, any region of an TGFBR2 gene (e.g., 5′ untranslated region [UTR], exon 1, exon 2, exon 3, exon 4, exon 5, exon 6, exon 7, exon 8, exon 9, exon 10, any intervening intronic regions, intron/exon junctions, the 3′ UTR, or polyadenylation signal) is targeted by an RNA-guided nuclease to alter the gene. In some embodiments, the TGFBR2 gene targeted by an RNA-guided nuclease is from a mammal. In some embodiments, the TGFBR2 gene targeted by an RNA-guided nuclease is from a human (hTGFBR2). In some embodiments, the TGFBR2 gene targeted by an RNA-guided nuclease is from a dog (cTGFBR2). In some embodiments, the TGFBR2 gene targeted by an RNA-guided nuclease is from a horse (eTGFBR2). In some embodiments, the TGFBR2 gene targeted by an RNA-guided nuclease is from a cat (fTGFBR2).

[0069] The terms “Interleukin-6 Receptor” or “IL6R” refer to the genes (NCBI Gene ID: 3560 [human], NCBI Gene ID: 612271 [canine], NCBI Gene ID: 102148787 [equine], NCBI Gene ID: 101085689 [feline]) or an encoded gene product (e.g., UniProt: P08887; CAA41231.1 [human], XP_038527979.1 [canine], XP_023496854.1 [equine], XP_023103841.2 [feline]), as well as sequence variants, proteins harboring conservative amino acid substitutions, and glycoforms thereof. Canonically, the proteins encoded by the genes listed above are transmembrane proteins capable of binding to interleukin-6, its native ligand. This binding event triggers intracellular signaling events that result in pro-inflammatory responses. See generally, Wolf, J., et al. (2014). Cytokine, 70 (1), 11-20. In some instances, and merely for the sake of disambiguation, a prefix is added when referring to the protein or gene of a particular species (with h, c, e, and f, referring to the human, canine, equine, and feline forms, respectively).

[0070] In certain embodiments, any region of an IL6R gene (e.g., 5′ untranslated region [UTR], exon 1, exon 2, exon 3, exon 4, exon 5, exon 6, exon 7, exon 8, exon 9, exon 10, exon 11, exon 12, exon 13, exon 14, exon 15, any intervening intronic regions, intron/exon junctions, the 3′ UTR, or polyadenylation signal) is targeted by an RNA-guided nuclease to alter the gene. In some embodiments, the IL6R gene targeted by an RNA-guided nuclease is from a mammal. In some embodiments, the IL6R gene targeted by an RNA-guided nuclease is from a human (hIL6R). In some embodiments, the IL6R gene targeted by an RNA-guided nuclease is from a dog (cIL6R). In some embodiments, the IL6R gene targeted by an RNA-guided nuclease is from a horse (eIL6R). In some embodiments, the IL6R gene targeted by an RNA-guided nuclease is from a cat (fIL6R).

[0071] The terms “Interleukin-6 Cytokine Family Signal Transducer,” “GP130,” or “IL6ST” refer to the genes (NCBI Gene ID: 3572 [human], NCBI Gene ID: 403545 [canine], NCBI Gene ID: 100051700 [equine], NCBI Gene ID: 101089832 [feline]) or an encoded gene product (e.g., UniProt: P40189; NP_001177910.1 [human], NP_001273950.1 [canine], XP_023481030.1 [equine], XP_011281205.1 [feline]), as well as sequence variants, proteins harboring conservative amino acid substitutions, and glycoforms thereof. Canonically, the proteins encoded by the genes listed above are signal transducers shared by many cytokines, including interleukin 6 (IL6), ciliary neurotrophic factor (CNTF), leukemia inhibitory factor (LIF), and oncostatin M (OSM) and function as a part of the cytokine receptor complex. Activation of this protein is dependent upon the binding of cytokines to their receptors (e.g., IL6 to IL6R). Knockout studies in mice suggest that this gene plays a critical role in regulating myocyte apoptosis. See generally, Martínez-Pérez, C., et al. (2021). Journal of Personalized Medicine, 11 (7), 618. In some instances, and merely for the sake of disambiguation, a prefix is added when referring to the protein or gene of a particular species (with h, c, e, and f, referring to the human, canine, equine, and feline forms, respectively

[0072] In certain embodiments, any region of an IL6ST gene (e.g., 5′ untranslated region [UTR], exon 1, exon 2, exon 3, exon 4, exon 5, exon 6, exon 7, exon 8, exon 9, exon 10, exon 11, exon 12, exon 13, exon 14, exon 15, exon 16, exon 17, exon 18, exon 19, exon 20, any intervening intronic regions, intron/exon junctions, the 3′ UTR, or polyadenylation signal) is targeted by an RNA-guided nuclease to alter the gene. In some embodiments, the IL6ST gene targeted by an RNA-guided nuclease is from a mammal. In some embodiments, the IL6ST gene targeted by an RNA-guided nuclease is from a human (hIL6ST). In some embodiments, the IL6ST gene targeted by an RNA-guided nuclease is from a dog (cIL6ST). In some embodiments, the IL6ST gene targeted by an RNA-guided nuclease is from a horse (eIL6ST). In some embodiments, the IL6ST gene targeted by an RNA-guided nuclease is from a cat (fIL6ST).

[0073] The terms “Tumor Necrosis Factor Receptor 1” or “TNFRSF1A” refer to the genes (NCBI Gene ID: 7132 [human], NCBI Gene ID: 403634 [canine], NCBI Gene ID: 100059548 [equine], NCBI Gene ID: 493957 [feline]) or an encoded gene product (e.g., UniProt: P19438; NP_001056.1 [human], XP_038295153.1 [canine], XP_023498787.1 [equine], NP_001009361.1 [feline]), as well as sequence variants, proteins harboring conservative amino acid substitutions, and glycoforms thereof. Canonically, the proteins encoded by the genes listed above are transmembrane receptor proteins capable of binding Tumor Necrosis Factor Alpha (TNFA) or lymphotoxin alpha (LTA), its principal ligand. Upon binding to TNFA, the receptor trimerizes and is activated, transmitting intracellular signaling cascades with role in various processes, including apoptosis and inflammation. See generally, Ward-Kavanagh, L. K., et al. (2016). Immunity, 44 (5), 1005-1019. In some instances, and merely for the sake of disambiguation, a prefix is added when referring to the protein or gene of a particular species (with h, c, e, and f, referring to the human, canine, equine, and feline forms, respectively).

[0074] In certain embodiments, any region of an TNFRSF1A gene (e.g., 5′ untranslated region [UTR], exon 1, exon 2, exon 3, exon 4, exon 5, exon 6, exon 7, exon 8, exon 9, exon 10, exon 11, any intervening intronic regions, intron/exon junctions, the 3′ UTR, or polyadenylation signal) is targeted by an RNA-guided nuclease to alter the gene. In some embodiments, the TNFRSF1A gene targeted by an RNA-guided nuclease is from a mammal. In some embodiments, the TNFRSF1A gene targeted by an RNA-guided nuclease is from a human (hTNFRSF1A). In some embodiments, the TNFRSF1A gene targeted by an RNA-guided nuclease is from a dog (cTNFRSF1A). In some embodiments, the TNFRSF1A gene targeted by an RNA-guided nuclease is from a horse (eTNFRSF1A). In some embodiments, the TNFRSF1A gene targeted by an RNA-guided nuclease is from a cat (fTNFRSF1A).

[0075] The terms “Tumor Necrosis Factor Receptor 2” or “TNFRSF1B” refer to the genes (NCBI Gene ID: 7133 [human], NCBI Gene ID: 487437 [canine], NCBI Gene ID: 100055840 [equine], NCBI Gene ID: 101080392 [feline]) or an encoded gene product (e.g., UniProt: P20333; XP_011540362.1 [human], XP_038387905.1 [canine], XP_023491528.1 [equine], XP_023113905.2 [feline]), as well as sequence variants, proteins harboring conservative amino acid substitutions, and glycoforms thereof. Canonically, the proteins encoded by the genes listed above are transmembrane receptor proteins capable of binding TNFA or LTA and are implicated in pro-survival pathways through downstream activation of NFkB pathway. See generally, Ward-Kavanagh, L. K., et al. (2016). Immunity, 44 (5), 1005-1019. In some instances, and merely for the sake of disambiguation, a prefix is added when referring to the protein or gene of a particular species (with h, c, e, and f, referring to the human, canine, equine, and feline forms, respectively).

[0076] In certain embodiments, any region of an TNFRSF1B gene (e.g., 5′ untranslated region [UTR], exon 1, exon 2, exon 3, exon 4, exon 5, exon 6, exon 7, exon 8, exon 9, exon 10, exon 11, exon 13, any intervening intronic regions, intron/exon junctions, the 3′ UTR, or polyadenylation signal) is targeted by an RNA-guided nuclease to alter the gene. In some embodiments, the TNFRSF1B gene targeted by an RNA-guided nuclease is from a mammal. In some embodiments, the TNFRSF1B gene targeted by an RNA-guided nuclease is from a human (hTNFRSF1B). In some embodiments, the TNFRSF1B gene targeted by an RNA-guided nuclease is from a dog (cTNFRSF1B). In some embodiments, the TNFRSF1B gene targeted by an RNA-guided nuclease is from a horse (eTNFRSF1B). In some embodiments, the TNFRSF1B gene targeted by an RNA-guided nuclease is from a cat (fTNFRSF1B).

[0077] The terms “Lymphotoxin Beta Receptor” or “TNFRSF3” refer to the genes (NCBI Gene ID: 4055 [human], NCBI Gene ID: 486728 [canine], NCBI Gene ID: 100059650 [equine], NCBI Gene ID: 101081146 [feline]) or an encoded gene product (e.g., UniProt: P36941; NP_001257916.1 [human], XP_038295148.1 [canine], XP_001492220.3 [equine], XP_003988366.4 [feline]), as well as sequence variants, proteins harboring conservative amino acid substitutions, and glycoforms thereof. Canonically, the proteins encoded by the genes listed above play a role in signaling during the development of lymphoid and other organs, lipid metabolism, immune response, and programmed cell death. Major ligands of this receptor include lymphotoxin alpha/beta and tumor necrosis factor ligand superfamily member 14 (TNFSF14). Activity of this receptor has also been linked to carcinogenesis. See generally, Seymour, R., et al. (2006). Veterinary Pathology, 43 (4), 401-423. In some instances, and merely for the sake of disambiguation, a prefix is added when referring to the protein or gene of a particular species (with h, c, e, and f, referring to the human, canine, equine, and feline forms, respectively).

[0078] In certain embodiments, any region of an TNFRSF3 gene (e.g., 5′ untranslated region [UTR], exon 1, exon 2, exon 3, exon 4, exon 5, exon 6, exon 7, exon 8, exon 9, exon 10, exon 11, exon 12, any intervening intronic regions, intron/exon junctions, the 3′ UTR, or polyadenylation signal) is targeted by an RNA-guided nuclease to alter the gene. In some embodiments, the TNFRSF3 gene targeted by an RNA-guided nuclease is from a mammal. In some embodiments, the TNFRSF3 gene targeted by an RNA-guided nuclease is from a human (hTNFRSF3). In some embodiments, the TNFRSF3 gene targeted by an RNA-guided nuclease is from a dog (cTNFRSF3). In some embodiments, the TNFRSF3 gene targeted by an RNA-guided nuclease is from a horse (eTNFRSF3). In some embodiments, the TNFRSF3 gene targeted by an RNA-guided nuclease is from a cat (fTNFRSF3).

[0079] The terms “OX40 Receptor,” “OX40,” “CD134,” or “TNFRSF4” refer to the genes (NCBI Gene ID: 7293 [human], NCBI Gene ID: 489600 [canine], NCBI Gene ID: 100066167 [equine], NCBI Gene ID: 493665 [feline]) or an encoded gene product (e.g., UniProt: P43489; XP_011540377.1 [human], XP_038520220.1 [canine], XP_001503612.3 [equine], NP_001009200.1 [feline]), as well as sequence variants, proteins harboring conservative amino acid substitutions, and glycoforms thereof. Canonically, the proteins encoded by the genes listed above specifically bind to OX40 ligand (OX40L) and are predominantly expressed on lymphocytes. The result of this binding is transient downstream intracellular signaling mediated via TRAF2 and other effector proteins that often occurs in response to the presence of antigen. See generally, Ward-Kavanagh, L. K., et al. (2016). Immunity, 44 (5), 1005-1019. In some instances, and merely for the sake of disambiguation, a prefix is added when referring to the protein or gene of a particular species (with h, c, e, and f, referring to the human, canine, equine, and feline forms, respectively).

[0080] In certain embodiments, any region of an TNFRSF4 gene (e.g., 5′ untranslated region [UTR], exon 1, exon 2, exon 3, exon 4, exon 5, exon 6, exon 7, any intervening intronic regions, intron/exon junctions, the 3′ UTR, or polyadenylation signal) is targeted by an RNA-guided nuclease to alter the gene. In some embodiments, the TNFRSF4 gene targeted by an RNA-guided nuclease is from a mammal. In some embodiments, the TNFRSF4 gene targeted by an RNA-guided nuclease is from a human (hTNFRSF4). In some embodiments, the TNFRSF4 gene targeted by an RNA-guided nuclease is from a dog (cTNFRSF4). In some embodiments, the TNFRSF4 gene targeted by an RNA-guided nuclease is from a horse (eTNFRSF4). In some embodiments, the TNFRSF4 gene targeted by an RNA-guided nuclease is from a cat (fTNFRSF4).

[0081] The terms “TNF Receptor Superfamily Member 11A” or “TNFRSF11A” refer to the genes (NCBI Gene ID: 8792 [human], NCBI Gene ID: 483957 [canine], NCBI Gene ID: 100056617 [equine], NCBI Gene ID: 101090651 [feline]) or an encoded gene product (e.g., UniProt: Q9Y6Q6; NP_001257878.1 [human], XP_038509502.1 [canine], XP_023503703.1 [equine], XP_023096972.1 [feline]), as well as sequence variants, proteins harboring conservative amino acid substitutions, and glycoforms thereof. Canonically, the proteins encoded by the genes listed above are transmembrane proteins capable of interacting with n various TRAF family proteins, through which the receptors induce the activation of NF-kappa B and MAPK8/JNK pathways. This receptor, with its ligand, is an important regulator of the interaction between T cells and dendritic cells and is also an essential mediator for bone metabolism and development. See generally, Xue, J. Y., et al. (2021). Journal of Bone and Mineral Metabolism, 39 (1), 45-53. In some instances, and merely for the sake of disambiguation, a prefix is added when referring to the protein or gene of a particular species (with h, c, e, and f, referring to the human, canine, equine, and feline forms, respectively).

[0082] In certain embodiments, any region of an TNFRSF11A gene (e.g., 5′ untranslated region [UTR], exon 1, exon 2, exon 3, exon 4, exon 5, exon 6, exon 7, exon 8, exon 9, exon 10, exon 11, exon 12, any intervening intronic regions, intron/exon junctions, the 3′ UTR, or polyadenylation signal) is targeted by an RNA-guided nuclease to alter the gene. In some embodiments, the TNFRSF11A gene targeted by an RNA-guided nuclease is from a mammal. In some embodiments, the TNFRSF11A gene targeted by an RNA-guided nuclease is from a human (hTNFRSF11A). In some embodiments, the TNFRSF11A gene targeted by an RNA-guided nuclease is from a dog (cTNFRSF11A). In some embodiments, the TNFRSF11A gene targeted by an RNA-guided nuclease is from a horse (eTNFRSF11A). In some embodiments, the TNFRSF11A gene targeted by an RNA-guided nuclease is from a cat (fTNFRSF11A).

[0083] The term “treatment” refers to obtaining a desired pharmacologic and/or physiologic effect. The effect may be prophylactic in terms of completely or partially preventing a disease or symptom thereof and/or may be therapeutic in terms of a partial or complete cure for a disease and/or adverse effect attributable to the disease. For example, a composition, method, or system of the present disclosure may be administered as a prophylactic treatment to a subject that has a predisposition for a given condition (e.g., arthritis). “Treatment”, as used herein, covers any treatment of a disease in a mammal, particularly in a human, canine, feline, or equine, and includes: (a) preventing the disease from occurring in a subject which may be predisposed to the disease but has not yet been diagnosed as having it; (b) inhibiting the disease, i.e., arresting its development or progression; and (c) relieving the disease, i.e., causing regression of the disease and/or relieving one or more disease symptoms.

[0084] “Treatment” is also meant to encompass delivery of an agent in order to provide for a pharmacologic effect, even in the absence of a disease or condition. For example, “treatment” encompasses delivery of a composition that can elicit an immune response or confer immunity in the absence of a disease condition, e.g., in the case of a vaccine. It is understood that compositions and methods of the present disclosure are applicable to treat all mammals, including, but not limited to human, canine, feline, equine, and bovine subjects.

[0085] The term “therapeutically effective” refers to the amount of a composition or combination of compositions as described herein that is sufficient to effect the intended application including, but not limited to, disease treatment. A therapeutically effective amount may vary depending upon the intended application (in vitro or in vivo), or the subject and disease condition being treated (e.g., the weight, age and gender of the subject), the severity of the disease condition, or the manner of administration. The term also applies to a dose that will induce a particular response in target cells (e.g., the reduction of platelet adhesion and/or cell migration). The specific dose will vary depending on the particular composition(s) chosen, the dosing regimen to be followed, whether the composition is administered in combination with other compositions or compounds, timing of administration, the tissue to which it is administered, and the physical delivery system in which the composition is carried.

[0086] The term “joint disease” is defined as measurable abnormalities in the cells or tissues of the joint that could lead to illness, for example, metabolic and molecular derangements triggering anatomical and/or physiological changes in the joint. Including, but not limited to, radiographic detection of joint space narrowing, subchondral sclerosis, subchondral cysts, and osteophyte formation.

[0087] “Joint illness” is defined in human subjects as symptoms that drive the subject to seek medical intervention, for example, subject reported pain, stiffness, swelling, or immobility. For non-human mammals, “joint illness” is defined, for example, as lameness, observable changes in gait, weight bearing, allodynia, or exploratory behavior.

[0088] A “back or spine condition or disorder” includes, but is not limited to, low back pain, neck pain, discogenic disorders, adolescent idiopathic scoliosis, adult degenerative scoliosis, cervical degenerative disc disease, cervical disc herniation, cervical myelopathy, cervical stenosis, compression fractures, degenerative spondylolisthesis, isthmic spondylolisthesis, low back sprains and strains, lumbar degenerative disc disease, lumbar disc herniation, lumbar stenosis, neck sprain (whiplash) and strain, neck strain, osteoporosis, and whiplash. Generally, such disorders or conditions contribute to or cause localized nociception, inflammation, or morphological changes (e.g., fibrosis, degeneration, osteolysis, osteogenesis) at the cervical, thoracic, lumbar or sacral spine, or surrounding tissues.

[0089] “Low back pain” is defined as measurable or discernible pain or discomfort (either chronic or sporadic) in a given subject, encompassing at least the lumbar-spinal region of a mammal. The pain may present as being localized to the lower back (e.g., muscle ache) or as shooting, burning, stinging, and/or radiating sensations throughout the subject's back and/or extremities. The pain may be idiopathic or may be associated with one or more (diagnosed or undiagnosed) underlying conditions including, but not limited to, chronic inflammation, arthritis, osteoporosis, trauma (e.g., post-surgical), neuropathies, musculo-skeletal abnormalities (e.g., slipped discs or spinal stenosis), herniated nucleus pulposus (HNP), annular ligament tears, facet joint arthritis, radicular nerve compression, and/or degenerative disorders.

[0090] “Neck pain” is defined as measurable or discernable pain or discomfort associated with the cervical spine or adjacent ligaments, muscles, and/or tendons. The pain may manifest as localized pain in the neck or shooting, stinging, burning, and/or radiating sensations throughout the back or extremities, including, but not limited to, the subject's head, shoulders, arms, legs, and/or back. Neck pain may be idiopathic or associated with one or more (diagnosed or undiagnosed) underlying conditions, including, but not limited to, rheumatoid arthritis, osteoporosis, fibromyalgia, chronic inflammation, herniated disc, spondylosis, spinal stenosis, whiplash, and/or degenerative disorders.

[0091] The terms “polynucleotide,” “nucleotide,” and “nucleic acid” are used interchangeably herein to refer to all forms of nucleic acid, oligonucleotides, including deoxyribonucleic acid (DNA) and ribonucleic acid (RNA). Polynucleotides include genomic DNA, cDNA and antisense DNA, and spliced or unspliced mRNA, rRNA, tRNA, lncRNA, RNA antagomirs, and inhibitory DNA or RNA (RNAi, e.g., small or short hairpin (sh) RNA, microRNA (miRNA), aptamers, small or short interfering (si) RNA, trans-splicing RNA, or antisense RNA). Polynucleotides also include non-coding RNA, which include for example, but are not limited to, RNAi, miRNAs, lncRNAs, RNA antagomirs, aptamers, and any other non-coding RNAs known to those of skill in the art. Polynucleotides include naturally occurring, synthetic, and intentionally altered or modified polynucleotides as well as analogues and derivatives. The term “polynucleotide” also refers to a polymeric form of nucleotides of any length, including deoxyribonucleotides or ribonucleotides, or analogs thereof, and is synonymous with nucleic acid sequence. A polynucleotide may comprise modified nucleotides, such as methylated nucleotides and nucleotide analogs, and may be interrupted by non-nucleotide components. If present, modifications to the nucleotide structure may be imparted before or after assembly of the polymer. The term polynucleotide, as used herein, refers interchangeably to double- and single-stranded molecules. Unless otherwise specified or required, any embodiment as described herein encompassing a polynucleotide encompasses both the double-stranded form and each of two complementary single-stranded forms known or predicted to make up the double-stranded form. Polynucleotides can be single, double, or triplex, linear or circular, and can be of any length. In discussing polynucleotides, a sequence or structure of a particular polynucleotide may be described herein according to the convention of providing the sequence in the 5′ to 3′ direction.

[0092] The term “gene” or “nucleotide sequence encoding a polypeptide” refers to the segment of DNA involved in producing a polypeptide chain. The DNA segment may include regions preceding and following the coding region (leader and trailer) involved in the transcription/translation of the gene product and the regulation of the transcription/translation, as well as intervening sequences (introns) between individual coding segments (exons). For example, a gene includes a polynucleotide containing at least one open reading frame capable of encoding a particular protein or polypeptide after being transcribed and translated.

[0093] The terms “extracellular domain” and “ectodomain” may be used interchangeably and, when referring to transmembrane cellular receptors, is defined as the portion of the protein that is exposed to the extracellular environment and is able to engage with and/or bind a ligand.

[0094] The terms “cytoplasmic domain” and “intracellular domain” may be used interchangeably and, when referring to transmembrane receptors, define the portion of the protein that is exposed to the cytoplasm. In many instances, these portions of the proteins comprise signaling domains to recruit and associate with various intracellular factors. Following engagement with a ligand via the extracellular domain, the interaction effects changes that may result in new association, dissociation or recruitment of various cytoplasmic factors that aid in transducing a signal.

[0095] The term “transmembrane domain,” which may be abbreviated as “TM,” as it refers to transmembrane receptors, is defined as the portion of the protein is embedded within the plasma membrane (i.e., not exposed to either the extracellular environment or the cytosol). Transmembrane domains are generally of a more hydrophobic character than either the extracellular or cytoplasmic portions and often adopt higher order helical structures. Though its primary role is an anchor, ligand-induced conformational changes to particular receptors have been shown to impact the transmembrane domain such that it is integral to the subsequent intracellular signaling.

[0096] The term “receptor” refers to a protein capable of binding another cognate protein (i.e., its ligand) with high affinity. This receptor-ligand interaction may be 1:1, or result in multimerization, wherein numerous proteins aggregate to bind one or more ligands. Receptors are generally present at the cell surface, such that they may most efficiently encounter a ligand and initiate intracellular signaling.

[0097] The term “intracellular signaling” refers to cellular changes that result due to events occurring at the cell surface. Typically, a soluble ligand binds its receptor at the cell surface, which can induce changes in the receptor, such that associated intracellular factors are also affected. These factors may then impact others within the cell, and this cascade continues until, in many cases, a particular factor is able to alter gene expression in the nucleus in response to the stimulus at the surface.

[0098] The term “RNA-guided nuclease” refers to an enzyme capable of breaking the backbone of, for example, a DNA molecule. The activity of RNA-guided nucleases is directed by a nucleic acid molecule (i.e., guide RNA). Once properly oriented to form a functional ribonucleoprotein complex, the enzyme locates a specific position within a target nucleic acid (e.g., a gene or locus) via sequence complementarity with a portion of the guide RNA. Non-exhaustive examples of RNA-guided nucleases include Cas9, Cas12 and Cas12a (previously known as Cpf1).

[0099] The term “Cas9” refers to an RNA-guided, double-stranded DNA-binding nuclease protein or nickase protein, or a variant thereof and may be used to refer to either naturally-occurring or recombinant Cas9 nucleases variants (e.g., ES-Cas9, HF-Cas9, PE-Cas9, and AR-Cas9). The wildtype Cas9 nuclease has two functional domains, e.g., RuvC and HNH, that simultaneously cut both strands of double stranded DNA, resulting in a double-strand break. Cas9 enzymes described herein may comprise a HNH or HNH-like nuclease domain and/or a RuvC or RuvC-like nuclease domain without impacts on the ability to induce double-strand breaks in genomic DNA (e.g., at a target locus) when both functional domains are active. The Cas9 enzyme may comprise one or more catalytic domains of a Cas9 protein derived from bacteria belonging to the group consisting of Corynebacter, Sutterella, Legionella, Treponema, Filifactor, Eubacterium, Streptococcus, Lactobacillus, Mycoplasma, Bacteroides, Flaviivola, Flavobacterium, Sphaerochaeta, Azospirillum, Gluconacetobacter, Neisseria, Roseburia, Parvibaculum, Staphylococcus, Nitratifractor, and Campylobacter. In some embodiments, the two catalytic domains are derived from different bacteria species.

[0100] As used herein, “PAM” refers to a Protospacer Adjacent Motif and is necessary for an RNA-guided nuclease to bind a target nucleic acid. In many instances, the PAM directly abuts the complementary sequence in the target. Naturally-occurring Cas9, for example, molecules recognize specific PAM sequences (see, e.g., Table 1). In some embodiments, a Cas9 molecule has the same PAM specificities as a naturally occurring Cas9 molecule. In other embodiments, a Cas9 molecule has a PAM specificity not associated with a naturally occurring Cas9 molecule. In other embodiments, a Cas9 molecule's PAM specificity is not associated with the naturally occurring Cas9 molecule to which it has the closest sequence homology. For example, a naturally occurring Cas9 molecule can be altered such that the PAM sequence recognition is altered to decrease off target sites, improve specificity, or eliminate a PAM recognition requirement. In an embodiment, a Cas9 molecule may be altered (e.g., to lengthen a PAM recognition sequence, improve Cas9 specificity to high level of identity, to decrease off target sites, and/or increase specificity). In an embodiment, the length of the PAM recognition sequence is at least 4, 5, 6, 7, 8, 9, 10 or 15 amino acids in length. In some embodiments, a Cas9 molecule may be altered to ablate PAM recognition.

[0101] The terms “guide RNA,” “gRNA” or “sgRNA” may be used interchangeably and refer to an RNA molecule, preferably a synthetic RNA molecule, composed of a targeting (crRNA) sequence and scaffold. These molecules, once loaded onto a functional RNA-guided nuclease can direct sequence-specific cleavage of a target nucleic acid.

[0102] An sgRNA can be administered or formulated, e.g., as a synthetic RNA, or as a nucleic acid comprising a sequence encoding the gRNA, which is then expressed in the target cells. As would be evident to one of ordinary skill in the art, various tools may be used in the design and/or optimization of an sgRNA in order to, for example, increase specificity and/or precision of genomic editing at a particular site.

[0103] In general, candidate sgRNAs may be designed and identified by first locating suitable PAMs within a genomic sequence. Then additional calculations may be utilized to predict on-target and off-target efficiencies. Available web-based tools to aid in the initial design and modeling of candidate sgRNAs include, without limitation, CRISPRseek, CRISPR Design Tool, Cas-OFFinder, E-CRISP, ChopChop, CasOT, CRISPR direct, CRISPOR, BREAKING-CAS, CrispRGold, and CCTop. See, e.g., Safari, F. et al. (2017). Current Pharmaceutical Biotechnology, 18 (13): 1038-54, which is incorporated by reference herein in its entirety for all purposes. Such tools are also described, for example, in PCT Publication No. WO2014093701A1 and Liu, G. et al. (2020). Computational approaches for effective CRISPR guide RNA design and evaluation. Computational and Structural Biotechnology Journal, 18:35-44, each of which is incorporated by reference herein in its entirety for all purposes. Candidate sgRNAs may be further assessed by experimental screening or other methodologies.

[0104] The terms “CRISPR RNA” or “crRNA” refer to the portion of an sgRNA molecule with complementarity to the target nucleic acid.

[0105] The phrase “pharmaceutically acceptable” refers to those compounds, materials, compositions, and/or dosage forms that are, within the scope of sound medical judgment, suitable for use in contact with the tissues of human beings and animals without excessive toxicity, irritation, allergic response, or other problems or complications commensurate with a reasonable benefit/risk ratio.

[0106] The terms “pharmaceutically acceptable carrier” or “pharmaceutically acceptable excipient” are intended to include any and all solvents, dispersion media, coatings, antibacterial and antifungal agents, isotonic and absorption delaying agents, and inert ingredients. The use of such pharmaceutically acceptable carriers or pharmaceutically acceptable excipients for active pharmaceutical ingredients is well known in the art. Except insofar as any conventional pharmaceutically acceptable carrier or pharmaceutically acceptable excipient is incompatible with the active pharmaceutical ingredient, its use in the therapeutic compositions of the disclosure is contemplated. Additional active pharmaceutical ingredients, such as other drugs, can also be incorporated into the described compositions and methods.

[0107] The term “pharmaceutically acceptable excipient” is intended to include vehicles and carriers capable of being co-administered with a compound to facilitate the performance of its intended function. The use of such media for pharmaceutically active substances is well known in the art. Examples of such vehicles and carriers include solutions, solvents, dispersion media, delay agents, emulsions and the like. Any other conventional carrier suitable for use with the multi-binding compounds also falls within the scope of the present disclosure.

[0108] As used herein, the term “a”, “an”, or “the” generally is construed to cover both the singular and the plural forms.

[0109] The terms “about” and “approximately” mean within a statistically meaningful range of a value. Such a range can be within an order of magnitude, preferably within 50%, more preferably within 20%, more preferably still within 10%, and even more preferably within 5% of a given value or range. The allowable variation encompassed by the terms “about” or “approximately” depends on the particular system under study, and can be readily appreciated by one of ordinary skill in the art. Moreover, as used herein, the terms “about” and “approximately” mean that compositions, amounts, formulations, parameters, shapes and other quantities and characteristics are not and need not be exact, but may be approximate and/or larger or smaller, as desired, reflecting tolerances, conversion factors, rounding off, measurement error and the like, and other factors known to those of skill in the art. In general, a dimension, size, formulation, parameter, shape or other quantity or characteristic is “about” or “approximate,” whether or not expressly stated to be such. It is noted that embodiments of very different sizes, shapes and dimensions may employ the described arrangements.

[0110] The term “substantially” as used herein can refer to a majority of, or mostly, as in at least about 50%, 60%, 70%, 80%, 90%, 95%, 96%, 97%, 98%, 99%, 99.5%, 99.9%, 99.99%, or at least about 99.999% or more.

[0111] The transitional terms “comprising,” “consisting essentially of,” and “consisting of,” when used in the appended claims, in original and amended form, define the claim scope with respect to what unrecited additional claim elements or steps, if any, are excluded from the scope of the claim(s). The term “comprising” is intended to be inclusive or open-ended and does not exclude any additional, unrecited element, method, step or material. The term “consisting of” excludes any element, step or material other than those specified in the claim and, in the latter instance, impurities ordinary associated with the specified material(s). The term “consisting essentially of” limits the scope of a claim to the specified elements, steps or material(s) and those that do not materially affect the basic and novel characteristic(s) of the claimed methods and compositions. All compositions, methods, and kits described herein that embody the present disclosure can, in alternate embodiments, be more specifically defined by any of the transitional terms “comprising,” “consisting essentially of,” and “consisting of.”

### III. Methods

### A. CRISPR

[0112] Unless otherwise defined, all technical and scientific terms used herein have the same meaning as commonly understood by one of ordinary skill in the art to which this disclosure belongs. Although methods and materials similar or equivalent to those described herein may be used in the practice or testing of the present disclosure, suitable methods and materials are described below. All publications, patent applications, patents, and other references mentioned herein are incorporated by reference in their entirety. In addition, the materials, methods, and examples are illustrative only and not intended to be limiting.

[0113] In one aspect, the present disclosure encompasses compositions relating to clustered regularly interspaced short palindromic repeats (CRISPR) and CRISPR-associated RNA-guided nucleases and associated methods, components, and compositions (hereafter, CRISPR/Cas systems). Such systems minimally require at least one isolated or non-naturally-occurring RNA-guided nuclease (e.g., a Cas9 protein) and at least one isolated or non-naturally-occurring guide RNA (e.g., an sgRNA) to effectuate augmentation of a nucleic acid sequence (e.g., genomic DNA).

[0114] In some embodiments, a CRISPR/Cas system effectuates the alteration of a targeted gene or locus in a eukaryotic cell by effecting an alteration of the sequence at a target position (e.g., by creating an insertion or deletion (collectively, an indel) resulting in loss-of-function of (i.e., knocking out) the affected gene or allele; e.g., a nucleotide substitution resulting in a truncation, nonsense mutation, or other type of loss-of-function of an encoded product of, for example, one or more IL1R1, IL1RAP, TGFBR1, TGFBR2, IL6R, IL6ST, TNFRSF1A, TNFRSF1B, TNFRSF3, TNFRSF4, or TNFRSF11A gene (i.e., mRNA or protein); a deletion of one or more nucleotides resulting in a truncation, nonsense mutation, or other type of loss-of-function of an encoded product of, for example, one or more IL1R1, IL1RAP, TGFBR1, TGFBR2, IL6R, IL6ST, TNFRSF1A, TNFRSF1B, TNFRSF3, TNFRSF4, or TNFRSF11A gene; e.g., loss-of-function of the encoded mRNA or protein by a single nucleotide, double nucleotide, or other frame-shifting deletion, or a deletion resulting in a premature stop codon; or an insertion resulting in a truncation, nonsense mutation, or other type of loss-of-function of an encoded gene product, such as an encoded gene product of, for example, one or more IL1R1, IL1RAP, TGFBR1, TGFBR2, IL6R, IL6ST, TNFRSF1A, TNFRSF1B, TNFRSF3, TNFRSF4, or TNFRSF11A gene (i.e., mRNA or protein); e.g., a single nucleotide, double nucleotide, or other frame-shifting insertions, or an insertion resulting in a premature stop codon. In some embodiments, a CRISPR/Cas system of the present disclosure provides for the alteration of a gene and/or encoded product of a gene, such that the altered product has a resultant loss-of-function and becomes a dominant negative or decoy (e.g., a transmembrane receptor incapable of initiating intracellular signaling or a soluble receptor).

[0115] In one aspect, CRISPR/Cas systems effectuate changes to the sequence of a nucleic acid through nuclease activity. For example, in the case of genomic DNA, the RNA-guided-nuclease locates a target position within a targeted gene or locus by sequence complementarity with the target genomic sequence (e.g., CRISPR RNA (crRNA) or a complementary component of a synthetic single guide RNA (sgRNA)) and cleaves the genomic DNA upon recognition of a particular, nuclease-specific motif called the protospacer adjacent motif (PAM). See generally, Collias, D., & Beisel, C. L. (2021). Nature Communications, 12 (1), 1-12.

[0116] Nuclease activity (i.e., cleavage) induces a double-strand break (DSB) in the case of genomic DNA. Endogenous cellular mechanisms of DSB repair, namely non-homologous end joining (NHEJ), microhomology-mediated end joining (MMEJ), and homologous recombination, result in erroneous repair at a given target position with some calculable frequency as a result of interference from said components of the CRISPR/Cas system, thereby introducing substitutions or indels into the genomic DNA. See generally Scully, R., et al. (2019). Nature Reviews Molecular Cell Biology, 20 (11), 698-714. At some frequency, these indels and/or substitutions may result in frameshifts, nonsense mutations (i.e., early stop codons) or truncations that impact the availability of gene products, such as mRNA and/or protein. In certain embodiments, the CRISPR/Cas system may induce a homology-directed repair (HDR) mechanism leading to insertions of non-random sequences at a target position through the use of templates (e.g., an HDR template) provided to the cell as part of the system along with the nuclease and gRNA. See Bloh, K., & Rivera-Torres, N. (2021). International Journal of Molecular Sciences, 22 (8), 3834.

[0117] In general, the minimum requirements of the CRISPR/Cas system will be dependent upon the nuclease (i.e., Cas protein) provided therewith. To this extent, these bacterially-derived nucleases have been functionally divided into Types I, III, and V, which all fall into Class 1 and Types II, IV, and VI that are grouped into Class 2.

### Class 1 CRISPR/Cas Systems:

[0118] The exact components, compositions, and methods for effectuating a change in a targeted nucleic acid sequence using a Class 1 CRISPR/Cas system will vary, but should minimally include: a nuclease (selected from at least Types I, and III), at least one guide RNA selected from 1) sgRNA or 2) a combination of crRNA and tracrRNA. These CRISPR/Cas systems have been categorized together as Class 1 CRISPR/Cas systems due to their similarities in requirements and mode of action within a eukaryotic cell. To this end, compositions, components, and methods among Class 1 constituents may be considered functionally interchangeable, and the following details, provided merely for exemplary purposes, do not represent an exhaustive list of class members:

[0119] Cas3 (see Table 1) is the prototypical Type I DNA nuclease that functions as the effector protein as part of a larger complex (the Cascade complex comprising Cse1, Cse2,), that is capable of genome editing. See generally He, L., et al. (2020). Genes, 11 (2), 208. Unlike other CRISPR/Cas systems, Type I systems localize to the DNA target without the Cas3 nuclease via the Cascade complex, which then recruits Cas3 to cleave DNA upon binding and locating the 3′ PAM. The Cascade complex is also responsible for processing crRNAs such that they can be used to guide it to the target position. Because of this functionality, Cascade has the ability to process multiple arrayed crRNAs from a single molecule. See. Luo, M. (2015). Nucleic Acids Research, 43 (1), 674-681. As such, Type I system may be used to edit multiple targeted genes or loci from a single molecule.

[0120] Because the natural Cas3 substrate is ssDNA, its function in genomic editing is thought to be as a nickase; however, when targeted in tandem, the resulting edit is a result of blunt end cuts to opposing strands to approximate a blunt-cutting endonuclease, such as Cas9. See Pickar-Oliver, A., & Gersbach, C. A. (2019). Nature Reviews Molecular Cell Biology, 20 (8), 490-507.

[0121] Like Type I nucleases, the Type III system relies upon a complex of proteins to effect nucleic acid cleavage. Particularly, Cas 10 possesses the nuclease activity to cleave ssDNA in prokaryotes. See Tamulaitis, G. Trends in Microbiology, 25 (1), 49-61 (2017). Interestingly, this CRISPR/Cas system, native to archaea, exhibits dual specificity and targets both ssDNA and ssRNA. Aside from this change, the system functions much like Type I in that the crRNA targets an effector complex (similar to Cascade) in a sequence-dependent manner. Similarly, the effector complex processes crRNAs prior to association. The dual nature of this nuclease makes its applications to genomic editing potentially more powerful, as both genomic DNA and, in some cases, mRNAs with the same sequence may be targeted to silence particular targeted genes.

### Class 2 CRISPR/Cas Systems:

[0122] The exact components, compositions, and methods for effectuating a change in a targeted nucleic acid sequence using a Class 2 CRISPR/Cas system will vary but should minimally include: a nuclease (selected from at least Types II, and V), at least one guide RNA selected from 1) sgRNA or 2) a combination of crRNA and tracrRNA. These CRISPR/Cas systems have been categorized together as Class 2 CRISPR/Cas systems due to their similarities in requirements and mode of action within a eukaryotic cell. To this end, compositions, components, and methods among Class 2 constituents may be considered functionally interchangeable, and the following details, provided merely for exemplary purposes, do not represent an exhaustive list of class members:

[0123] Type II nucleases are the best-characterized CRISPR/Cas systems, particularly the canonical genomic editing nuclease Cas9 (see Table 1). Multiple Cas9 proteins, derived from various bacterial species, have been isolated. The primary distinction between these nucleases is the PAM, a required recognition site within the targeted dsDNA. After association with a gRNA molecule, the crRNA (or targeting domain of a sgRNA) orients the nuclease at the proper position, but the protein's recognition of the PAM is what induces a cleavage event near that site, resulting in a blunt DSB.

[0124] In addition to the naturally-derived Cas9 proteins, several engineered variants have similarly been reported. These range from Cas9 with enhanced specific (i.e., less off-target activity), such as espCas9. Others have been catalytically modified via point mutations in the RuvC (e.g., D10A) and HNH (e.g., H840A) domains such that they induce only single-strand breaks (i.e., Cas9 nickases). See Frock, R. et al. (2015). Nature Biotechnology, 33 (2), 179-186. These have also been shown to be less error-prone in editing. Such mitigation of off-target effects becomes paramount when selecting for a desired insertion (i.e., a knock in mutation, in which a desired nucleotide sequence is introduced into a target nucleic acid molecule) rather than a deletion. Indeed, less off-target effects may aid in the preferred DNA repair mechanism (HDR, in most instances for knock in mutations). See generally Naeem, M., et al. (2020). Cells, 9 (7), 1608.

[0125] Additional exemplary further engineered variants of canonical Cas proteins (e.g., mutants, chimeras, and include the following (each of which are hereby incorporated by reference in their entireties for all purposes): WO2015035162A2, WO2019126716A1, WO2019126774A1, WO2014093694A1, WO2014150624A1, US20190225955A1, U.S. patent Ser. No. 11/427,818, U.S. patent Ser. No. 11/242,542, U.S. patent Ser. No. 11/098,297, U.S. patent Ser. No. 10/876,100, U.S. patent Ser. No. 10/767,193, U.S. patent Ser. No. 10/494,621, and U.S. patent Ser. No. 10/100,291.

[0126] For the avoidance of doubt, SpCas9 collectively refers to any one of the group consisting of espCas9 (also referred to herein as ES-Cas9 or esCas9), HF-Cas9, PE-Cas9, ARCas9 (also referred to as AR-Cas9).

[0127] Like the canonical Cas9 systems, Type V nucleases only require a synthetic sgRNA with a targeting domain complementary to a genomic sequence to carry out genomic editing. These nucleases contain a RuvC domain but lack the HNH domain of Type II nucleases. Further, Cas12, for example, leaves a staggered cut in the dsDNA substrate distal to the PAM, as compared to Cas9's blunt cut next to the PAM. Both Cas12a, also known as Cpf1, and Cas12b, also known as C2c1 (see Table 1), act as part of larger complex of two gRNA-associated nucleases that acts on dsDNA as a quaternary structure, nicking each strand simultaneously. See Zetsche, B. et al. (2015). Cell, 163 (3): 759-771; see also Liu, L. et al. (2017). Molecular Cell, 65 (2): 310-322. Additionally, Cas12b (C2cl) is a highly accurate nuclease with little tolerance for mismatches. See Yang, H. et al. (2016). Cell, 167 (7): 1814-1828.e12.

TABLE 1
Exemplary list of Cas nucleases and their requirements

| | | | Spacer |
|---|---|---|---|
| | | Type of end generated | length |
| Nuclease (Species) | PAM (5′ → 3′) | (nucleic acid target) | (nt) |
| Cas9 (S. pyogenes) | NGG | Blunt (dsDNA) | 20 |
| Cas9 (S. aureus) | NNGRRT | Blunt (dsDNA) | 20 |
| Cas9 (C. jejuni) | NNNNRYAC | Blunt (dsDNA) | 22 |
| Cas9 (S. thermophilus) | NNAGAAW | Blunt (dsDNA) | 20 |
| Cas9 (N. meningitidis) | NNNNGATT | Blunt (dsDNA) | 24 |
| Cas9 (F. novicida) | NGG | Blunt (dsDNA) | 21 |
| Cas12a (L. bacterium) | TTTV | 5' staggered | 23-25 |
| | | (dsDNA/ssDNA) | |
| Cas 12a (Acidamino- | TTTN | 5' staggered | 24 |
| coccus sp.) | | (dsDNA/ssDNA) | |
| Cas3 (E. coli) | CTT/CCT/CAT/CTC | None/blunt (ssDNA) | 32 |

See generally Wang, J., Zhang, C., & Feng, B. (2020). Journal of Cellular and Molecular Medicine, 24(6), 3256-3270, where N = any nucleotide; R = any purine (A or G); Y = any pyrimidine (C or T); W = A or T; V = A, C or G.

[0128] In one aspect, the CRISPR/Cas system of the present disclosure comprises at least one RNA-guided nuclease (e.g. a Cas protein) derived from one or more of the following selected bacterial genera: Corynebacterium, Sutterella, Legionella, Treponema, Filifactor, Eubacterium, Streptococcus, Lactobacillus, Mycoplasma, Bacteroides, Flavobacterium, Spirochaeta, Azospirillum, Gluconacetobacter, Neisseria, Roseburia, Parvibaculum, Nitratifractor, Campylobacter, Pseudomonas, Streptomyces, Staphylococcus, Francisella, Acidaminococcus, Lachnospiraceae, Leptotrichia, and Prevotella. In some embodiments, the Cas protein is derived from Deltaproteobacteria or Planctomycetes bacterial species.

[0129] Some aspects of the present disclosure provide strategies, methods, compositions, and treatment modalities for altering a targeted sequence within a gene locus (e.g., altering the sequence of wild type and/or of a mutant sequence within a cell or within a mammal) by insertion or deletion of one or more nucleotides mediated by an RNA-guided nuclease and one or more guide RNAs (gRNAs), resulting in loss of function of the targeted gene product. In some embodiments, the loss of function results in “knocking out” the gene of interest (i.e., generation of a “knock out”) by ablating gene expression. In some embodiments, the loss function results in a non-functional gene product (i.e., a gene product without all functionality of the wildtype gene product). In some embodiments, the loss of function results in expression of gene product with different characteristics (e.g., different binding affinity or different cellular localization).

[0130] In certain embodiments, the targeted gene is selected from IL1R1, IL1RAP, TGFBR1, TGFBR2, IL6R, IL6ST, TNFRSF1A, TNFRSF1B, TNFRSF3, TNFRSF4, TNFRSF11A, and combinations thereof. In some embodiments, any region of the targeted gene (e.g., a promoter region, a 5′ untranslated region, a 3′ untranslated region, an exon, an intron, or an exon/intron border) is targeted by an RNA-guided nuclease to alter the gene. In some embodiments, a non-coding region of the targeted gene (e.g., an enhancer region, a promoter region, an intron, 5′ UTR, 3′ UTR, polyadenylation signal) is targeted to alter the gene.

### CRISPR Guide RNAs:

[0131] In one aspect, the CRISPR/Cas system of the present disclosure further provides a gRNA molecule (e.g., an isolated or non-naturally occurring RNA molecule) that interacts with the RNA-guided nuclease. In certain embodiments, the gRNA is an sgRNA comprising a crRNA sequence comprising a nucleotide sequence which is complementary to a sequence in a target nucleic acid. In some embodiments, the sgRNA further comprises an RNA scaffolding portion (i.e. tracrRNA) that interacts with the RNA-guided nuclease, such that the crRNA is positioned to scan a target nucleic acid for complementarity. In some embodiments, the system is further, optionally, comprised of an oligonucleotide—an HDR template with homology to either side of the target position. See Bloh, K., & Rivera-Torres, N. (2021). International Journal of Molecular Sciences, 22 (8): 3834.

[0132] In an embodiment, the RNA-guided nuclease and sgRNA are configured to orient an associated nuclease such that a cleavage event, (e.g., a double strand break or a single strand break) occurs sufficiently close to a complementary sequence in the targeted nucleic acid, thereby facilitating an alteration in the nucleic acid sequence. In some embodiments, the crRNA is 20 nucleotides in length. In some embodiments, the crRNA is 14, 15, 16, 17, 18, 19, 20, 21, 22, 23, 24, 25, 26, 27, 28, 29, or 30 nucleotides in length.

[0133] In some embodiments, the crRNA orients the RNA-guided nuclease such that a cleavage event occurs within 1, 2, 3, 4, 5, 10, 15, 20, 25, 30, 35, 40, 45, 50, 55, 60, 65, 70, 75, 80, 85, 90, 95, 100, 125, 150, 175, or 200 nucleotides away from the complementary sequence in the targeted nucleic acid. The double- or single-strand break may be positioned upstream or downstream of the complementary sequence in the targeted nucleic acid. In some embodiments, the cleavage event occurs within a targeted gene. In some embodiments, the cleavage event occurs upstream of a targeted gene.

[0134] In certain embodiments, a second gRNA molecule, comprising a second crRNA orients a second RNA-guided nuclease, such that a cleavage event occurs sufficiently close to a complementary sequence in the targeted nucleic acid, thereby facilitating an alteration in the nucleic acid sequence. In some embodiments, the first gRNA and the second gRNA promote a cleavage event within a single targeted gene. In some embodiments, the first gRNA and the second gRNA promote a cleavage event within different targeted genes. In some embodiments, the second crRNA is 20 nucleotides in length. In some embodiments, the second crRNA is 14, 15, 16, 17, 18, 19, 20, 21, 22, 23, 24, 25, 26, 27, 28, 29, or 30 nucleotides in length.

[0135] In some embodiments, the second crRNA orients the RNA-guided nuclease such that a cleavage event occurs within 1, 2, 3, 4, 5, 10, 15, 20, 25, 30, 35, 40, 45, 50, 55, 60, 65, 70, 75, 80, 85, 90, 95, 100, 125, 150, 175, or 200 nucleotides away from the complementary sequence in the targeted nucleic acid. The double- or single-strand break may be positioned upstream or downstream of the complementary sequence in the targeted nucleic acid. In some embodiments, the cleavage event occurs within a targeted gene. In some embodiments, the cleavage event occurs upstream of a targeted gene.

[0136] In some embodiments, the targeting domains of the first gRNA and the second gRNA are configured such that a cleavage event is positioned, independently for each of the gRNA molecules, within 1, 2, 3, 4, 5, 10, 15, 20, 25, 30, 35, 40, 45, 50, 55, 60, 65, 70, 75, 80, 85, 90, 95, 100, 125, 150, 175, or 200 nucleotides of the others cleavage event. In some embodiments, the first gRNA and the second gRNA molecules alter the targeted nucleic acid sequences simultaneously. In some embodiments, the first gRNA and the second gRNA molecules alter the targeted nucleic acid sequences sequentially.

[0137] In some embodiments, a single-strand break is accompanied by a second single-strand break, positioned by the crRNA of a first gRNA and a second gRNA, respectively. For example, the crRNA may orient the associated RNA-guided nucleases such that a cleavage event, (e.g., the two single-strand breaks), are positioned within 1, 2, 3, 4, 5, 10, 15, 20, 25, 30, 35, 40, 45, 50, 55, 60, 65, 70, 75, 80, 85, 90, 95, 100, 125, 150, 175, or 200 nucleotides of one another. In some embodiments, a first crRNA and a second crRNA are configured to orient associated RNA-guided nucleases such that, for example, two single-strand breaks occurs at the same position, or within 1, 2, 3, 4, 5, 10, 15, 20, 25, 30, 35, 40, 45, 50 nucleotides of one another, on opposing strands of genomic DNA, thereby essentially approximating a double strand break.

[0138] In some embodiments, the nucleic acid encoding one or more crRNAs is selected from any of SEQ ID NOs: 680-1039. In some embodiments, the nucleic acid encoding one or more crRNAs target hIL1R1 and is selected from any of SEQ ID NOs: 680-824. In some embodiments, the nucleic acid encoding one or more crRNAs target cIL1R1 and is selected from any of SEQ ID NOs: 825-892 and SEQ ID NOs: 3336-3420. In some embodiments, the nucleic acid encoding one or more crRNAs target eIL1R1 and is selected from any of SEQ ID NOs: 893-967. In some embodiments, the nucleic acid encoding one or more crRNAs target fIL1R1 and is selected from any of SEQ ID NOs: 968-1039.

[0139] In some embodiments, the nucleic acid encoding one or more crRNAs is selected from any of SEQ ID NOs: 1040-1424. In some embodiments, the nucleic acid encoding one or more crRNAs target hIL1RAP and is selected from any of SEQ ID NOs: 1040-1203. In some embodiments, the nucleic acid encoding one or more crRNAs target cIL1RAP and is selected from any of SEQ ID NOs: 1204-1271 and SEQ ID NOs: 3421-3490. In some embodiments, the nucleic acid encoding one or more crRNAs target eIL1RAP and is selected from any of SEQ ID NOs: 1272-1348. In some embodiments, the nucleic acid encoding one or more crRNAs target fIL1RAP and is selected from any of SEQ ID NOs: 1349-1424.

[0140] In some embodiments, the nucleic acid encoding one or more crRNAs is selected from any of SEQ ID NOs: 1425-1546. In some embodiments, the nucleic acid encoding one or more crRNAs target hTGFBR1 and is selected from any of SEQ ID NOs: 1425-1546.

[0141] In some embodiments, the nucleic acid encoding one or more crRNAs is selected from any of SEQ ID NOs: 1547-1745. In some embodiments, the nucleic acid encoding one or more crRNAs target hTGFBR2 and is selected from any of SEQ ID NOs: 1547-1745.

[0142] In some embodiments, the nucleic acid encoding one or more crRNAs is selected from any of SEQ ID NOs: 1746-1968. In some embodiments, the nucleic acid encoding one or more crRNAs target hIL6R and is selected from any of SEQ ID NOs: 1746-1968.

[0143] In some embodiments, the nucleic acid encoding one or more crRNAs is selected from any of SEQ ID NOs: 1969-2178. In some embodiments, the nucleic acid encoding one or more crRNAs target hIL6ST and is selected from any of SEQ ID NOs: 1969-2178.

[0144] In some embodiments, the nucleic acid encoding one or more crRNAs is selected from any of SEQ ID NOs: 2179-2395. In some embodiments, the nucleic acid encoding one or more crRNAs target hTNFRSF1A and is selected from any of SEQ ID NOs: 2179-2395.

[0145] In some embodiments, the nucleic acid encoding one or more crRNAs is selected from any of SEQ ID NOs: 2396-2642. In some embodiments, the nucleic acid encoding one or more crRNAs target hTNFRSF1B and is selected from any of SEQ ID NOs: 2396-2642.

[0146] In some embodiments, the nucleic acid encoding one or more crRNAs is selected from any of SEQ ID NOs: 2643-2866. In some embodiments, the nucleic acid encoding one or more crRNAs target hTNFRSF3 and is selected from any of SEQ ID NOs: 2643-2866.

[0147] In some embodiments, the nucleic acid encoding one or more crRNAs is selected from any of SEQ ID NOs: 2867-3041. In some embodiments, the nucleic acid encoding one or more crRNAs target hTNFRSF4 and is selected from any of SEQ ID NOs: 2867-3041.

[0148] In some embodiments, the nucleic acid encoding one or more crRNAs is selected from any of SEQ ID NOs: 3042-3335. In some embodiments, the nucleic acid encoding one or more crRNAs target hTNFRSF11A and is selected from any of SEQ ID NOs: 3042-3335.

[0149] In some embodiments a nucleic acid encodes a second sgRNA molecule. In some embodiments, a nucleic acid encodes a third sgRNA molecule. In some embodiments, a nucleic acid encodes a fourth sgRNA molecule.

[0150] In certain embodiments, a nucleic acid may comprise (a) a sequence encoding a first sgRNA, comprising a crRNA that is complementary with a sequence in a targeted gene, (b) a sequence encoding a second sgRNA, comprising a crRNA that is complementary with a sequence in a second targeted gene, and (c) a sequence encoding an RNA-guided nuclease (e.g., Cas9). Optionally, (d) and (e) are sequences encoding a third sgRNA and a fourth sgRNA, respectively. In some embodiments, the second targeted gene is the same as the first targeted gene. In other embodiments, the second targeted gene is different from the first targeted gene. In some embodiments, (a), (b), and (c) are encoded within the same nucleic acid molecule (e.g., the same vector). In some embodiments, (a) and (b) are encoded within the same nucleic acid molecule. In some embodiments, (a), (b) and (d) are encoded within the same nucleic acid molecule. In some embodiments, (a), (b) and (e) are encoded within the same nucleic acid molecule. In some embodiments, (a), (b), (d) and (e) are encoded within the same nucleic acid molecule. In some embodiments, (a), (b), and (c) are encoded within separate nucleic acid molecules. When more than two sgRNAs are used, any combination of (a), (b), (c), (d) and (e) may be encoded within a single or separate nucleic acid molecules.

[0151] In one aspect, the nucleic acid molecules (i.e., those encoding (a), (b), (c), (d) or (e)) are delivered to a target cell (i.e., any combination of the encoded RNA-guided nuclease of (c) and at least one encoded gRNA molecule of (a), (b), (d), or (e) contact a target cell). In some embodiments, said nucleic acid molecules are delivered to a target cell in vivo. In other embodiments, said nucleic acid molecules are delivered to a target cell ex vivo. In some embodiments, said nucleic acid molecules are delivered to a target cell in vitro. In certain embodiments, said nucleic acid molecules are delivered to a target cell as DNA. In other embodiments, said nucleic acid molecules are delivered to a target cell as RNA (e.g., mRNA). In some embodiments, the products of said nucleic acid molecules are delivered as an assembled ribonucleoprotein (RNP).

[0152] In some embodiments, contacting a target cell comprises delivering said RNA-guided nuclease of (c), as a protein with at least one said nucleic acid molecules selected from (a), (b), (d), and (e). In some embodiments, contacting a target cell comprises delivering said encoded RNA-guided nuclease of (c), as DNA with at least one said nucleic acid molecules selected from (a), (b), (d), and (e). In some embodiments, contacting a target cell comprises delivering said encoded RNA-guided nuclease of (c), as mRNA with at least one said nucleic acid molecules selected from (a), (b), (d), and (e).

[0153] In certain embodiments, CRISPR components are delivered to a target cell via nanoparticles. Exemplary nanoparticles that may be used with all CRISPR/Cas systems disclosed herein include, at least, lipid nanoparticles or liposomes, hydrogel nanoparticles, metalorganic nanoparticles, gold nanoparticles, magnetic nanoparticles and virus-like particles. See generally Xu, C. F. et al. (2021). Advanced Drug Delivery Reviews, 168:3-29.

### B. TALEN

[0154] In one aspect, the present disclosure contemplates use of methods, components, and compositions relating to Transcription Activator-Like Effector Nucleases (TALENs) to effectuate augmentation of a ‘nucleic acid sequence (e.g., a targeted gene.

[0155] TALE stands for “Transcription Activator-Like Effector” proteins, which include TALENs (“Transcription Activator-Like Effector Nucleases”). A method of using a TALE system for gene editing may also be referred to herein as a TALE method. TALEs are naturally occurring proteins from the plant pathogenic bacteria genus Xanthomonas, and contain DNA-binding domains composed of a series of 33-35-amino-acid repeat domains that each recognizes a single base pair. TALE specificity is determined by two hypervariable amino acids that are known as the repeat-variable di-residues (RVDs). Modular TALE repeats are linked together to recognize contiguous DNA sequences. A specific RVD in the DNA-binding domain recognizes a base in the target locus, providing a structural feature to assemble predictable DNA-binding domains. The DNA binding domains of a TALE are fused to the catalytic domain of a type IIS FokI endonuclease to make a targetable TALE nuclease. To induce site-specific mutation, two individual TALEN arms, separated by a 14-20 base pair spacer region, bring FokI monomers in close proximity to dimerize and produce a targeted double-strand break.

[0156] Several large, systematic studies utilizing various assembly methods have indicated that TALE repeats can be combined to recognize virtually any user-defined sequence. Custom-designed TALE arrays are also commercially available through Cellectis Bioresearch (Paris, France), Transposagen Biopharmaceuticals (Lexington, KY, USA), and Life Technologies (Grand Island, NY, USA). TALE and TALEN methods suitable for use in the present disclosure are described in U.S. Patent Application Publication Nos. US 2011/0201118 A1; US 2013/0117869 A1; US 2013/0315884 A1; US 2015/0203871 A1 and US 2016/0120906 A1, the disclosures of which are incorporated by reference herein.

[0157] Non-limiting examples of genes that may be silenced or inhibited by permanently gene-editing via a TALE method include IL1R1, IL1RAP, TGFBR1, TGFBR2, IL6R, IL6ST, TNFRSF1A, TNFRSF1B, TNFRSF3, TNFRSF4, TNFRSF11A, and combinations thereof. Non-limiting examples of genes that may be augmented such that their resultant products function as decoys or dominant negatives by permanently gene-editing via a TALE method include IL1R1, IL1RAP, TGFBR1, TGFBR2, IL6R, IL6ST, TNFRSF1A, TNFRSF1B, TNFRSF3, TNFRSF4, TNFRSF11A, and combinations thereof. Non-limiting examples of genes that may be enhanced by permanently gene-editing via a TALE method include IL1R1, IL1RAP, TGFBR1, TGFBR2, IL6R, IL6ST, TNFRSF1A, TNFRSF1B, TNFRSF3, TNFRSF4, TNFRSF11A, and combinations thereof. In an aspect, the disclosure provides compositions for up-regulation of protein receptors (including wildtype or genetically edited), including those that bind to anti-inflammatory cytokines via a TALE method.

[0158] Examples of systems, methods, and compositions for altering the expression of a target gene sequence by a TALE method, and which may be used in accordance with embodiments of the present disclosure, are described in U.S. Pat. No. 8,586,526, which is incorporated by reference herein.

### C. Zinc-Finger Nucleases (ZFN)

[0159] In one aspect, the present disclosure contemplates use of methods, components, and compositions relating to zinc-finger nucleases (ZFNs) to effectuate augmentation of a ‘nucleic acid sequence (e.g., a targeted gene).

[0160] An individual zinc finger contains approximately 30 amino acids in a conserved ββα configuration. Several amino acids on the surface of the α-helix typically contact 3 bp in the major groove of DNA, with varying levels of selectivity. Zinc fingers have two protein domains. The first domain is the DNA binding domain, which includes eukaryotic transcription factors and contain the zinc finger. The second domain is the nuclease domain, which includes the FokI restriction enzyme and is responsible for the catalytic cleavage of DNA.

[0161] The DNA-binding domains of individual ZFNs typically contain between three and six individual zinc finger repeats and can each recognize between 9 and 18 base pairs. If the zinc finger domains are specific for their intended target site then even a pair of 3-finger ZFNs that recognize a total of 18 base pairs can, in theory, target a single locus in a mammalian genome. One method to generate new zinc-finger arrays is to combine smaller zinc-finger “modules” of known specificity. The most common modular assembly process involves combining three separate zinc fingers that can each recognize a 3 base pair DNA sequence to generate a 3-finger array that can recognize a 9 base pair target site. Alternatively, selection-based approaches, such as oligomerized pool engineering (OPEN) can be used to select for new zinc-finger arrays from randomized libraries that take into consideration context-dependent interactions between neighboring fingers. Engineered zinc fingers are available commercially; Sangamo Biosciences (Richmond, CA, USA) has developed a propriety platform (CompoZr®) for zinc-finger construction in partnership with Sigma-Aldrich (St. Louis, MO, USA).

[0162] Non-limiting examples of genes that may be silenced or inhibited by permanently gene-editing via a zinc finger method include IL1R1, IL1RAP, TGFBR1, TGFBR2, IL6R, IL6ST, TNFRSF1A, TNFRSF1B, TNFRSF3, TNFRSF4, TNFRSF11A, and combinations thereof. Non-limiting examples of genes that may be augmented such that their resultant products function as decoys or dominant negatives by permanently gene-editing via a zinc finger method include IL1R1, IL1RAP, TGFBR1, TGFBR2, IL6R, IL6ST, TNFRSF1A, TNFRSF1B, TNFRSF3, TNFRSF4, TNFRSF11A, and combinations thereof. Non-limiting examples of genes that may be enhanced by permanently gene-editing via a zinc finger method include IL1R1, IL1RAP, TGFBR1, TGFBR2, IL6R, IL6ST, TNFRSF1A, TNFRSF1B, TNFRSF3, TNFRSF4, TNFRSF11A, and combinations thereof. In an aspect, the disclosure provides compositions for up-regulation of protein receptors (including wildtype or genetically edited), including those that bind to anti-inflammatory cytokines via a zinc finger method.

[0163] Examples of systems, methods, and compositions for altering the expression of a target gene sequence by a zinc finger method, which may be used in accordance with embodiments of the present disclosure, are described in U.S. Pat. Nos. 6,534,261, 6,607,882, 6,746,838, 6,794,136, 6,824,978, 6,866,997, 6,933,113, 6,979,539, 7,013,219, 7,030,215, 7,220,719, 7,241,573, 7,241,574, 7,585,849, 7,595,376, 6,903,185, and 6,479,626, which are incorporated by reference herein.

[0164] Other examples of systems, methods, and compositions for altering the expression of a target gene sequence by a zinc finger method, which may be used in accordance with embodiments of the present disclosure, are described in Beane, et al., Mol. Therapy, 2015, 23 1380-1390, the disclosure of which is incorporated by reference herein.

### IV. Joint Disease or Illness

### A. Introduction

[0165] As described herein, embodiments of the present disclosure provide compositions and methods for improving joint function and treating joint disease. In particular embodiments, compositions and methods are provided to gene-edit synovial fibroblasts, synoviocytes, chondrocytes, tissue (resident) macrophages, or other cells to reduce pro-inflammatory signaling mediated by the binding of inflammatory cytokines—including, but not limited to, IL1α, IL1β, TNFα, IL6, IL8, IL18, IL33, matrix metalloproteinases (MMPs), TGFβ1, TGFβ2, and combinations thereof—to their cognate receptor(s). Some embodiments are used for treating various forms of arthritis and other inflammatory joint diseases. Some embodiments are further useful for treating canine lameness due to osteoarthritis. Some embodiments are further useful for treating equine lameness due to joint disease. Some embodiments are further useful for treating feline lameness due to joint disease. Some embodiments are also useful for treating post-traumatic arthritis, gout, pseudogout, psoriatic arthritis, and other inflammation-mediated or immune-mediated joint diseases.

[0166] Treatment of osteoarthritis, degenerative joint disease, and other joint dysfunctions is complex, and few long-term options exist for either symptomatic relief or restoring joint function. Osteoarthritis (OA) is the leading cause of disability due to pain. See, Neogi, T. (2013). Osteoarthritis Cartilage, 21 (9): 1145-53. OA and similar diseases impact all mammal species, including working animals, domestic pets, and their owners. The common mechanistic thread among joint diseases is the presence of acute of chronic inflammation, which is driven by increased levels of pro-inflammatory cytokine signaling. Joint diseases tend to take a progressive course that encompasses discomfort, pain, and—especially in the case of OA—disability, depending on the degree of disease progression.

[0167] Psoriatic arthritis (PsA) is another chronic inflammatory joint disease, in which the joint symptoms are accompanied by skin lesions, such as those commonly associated with psoriasis. See, Boehncke, W. et al. (2014). British Journal of Dermatology, 170 (4): 772-786. Like other forms of arthritis, such as OA, PsA is caused by pro-inflammatory signaling of a host of cytokines, including IL1. Indeed, PsA morbidity has been shown to correlate with single nucleotide polymorphisms (SNPs) that impact the activity of the IL1 gene locus. See, Rahman, P. et al. (2006). Arthritis and Rheumatism, 54 (7): 2321-2325. These studies also implicate inflammatory cytokine signaling, in general, and IL1 more specifically, in disease progression.

[0168] Gout is a chronic inflammatory condition that affects joints. The underlying cause is monosodium urate (MSU) crystal deposition and the resultant host response, particularly in joint structures (as well as subcutaneous tissues and other sites). See, Dalbeth, N., & Stamp, L. (2014). Annals of the Rheumatic Diseases, 73 (9): 1598-1600. The clinical manifestations include recurrent acute flares of severe inflammatory arthritis and tendinobursitis. IL1 and other pro-inflammotory mediators are a major contributor to this host response. See, Dinarello, C. A. (2014). Molecular Medicine, 20 (1): S43-S58. To this end, effective blockade of these signaling pathways may provide relief to gout patients.

[0169] The current standard of care for many joint disease patients includes anti-inflammatory medications (e.g., NSAIDs) or anti-rheumatics (e.g., methotrexate [inhibitor of AICAR] or adalimumab [anti-TNF alpha monoclonal antibody]). See, Friedman, B., & Cronstein, B. (2019). Joint Bone Spine, 86 (3): 301-307. All of these treatments require repeated dosing for continued effectiveness, which may lead to toxicity issues or tolerance over time. As such, new methods and compositions to treat joint disease and illness are acutely needed to treat these chronic conditions.

[0170] In one aspect, the compositions and methods herein described are directed to treat joint disease or illness in a mammal in need thereof. In some embodiments, the joint disease or illness is osteoarthritis. In some embodiments, the joint disease or illness is psoriatic arthritis. In some embodiments, the joint disease or illness is gout.

[0171] Among the advantages of the present disclosure over treatments currently available for mammals afflicted with one or more joint disease or illness include the period of relief from symptoms. Upon genetic editing of a cell within a joint, pro-inflammatory signaling is silenced through the targeted gene for the life of that cell and any mitotic progeny. By contrast, biologic treatments require periodic dosing, which may magnify the impact of the host of potentially severe side effects. Among various genetic approaches, the present disclosure is also superior due to, among other reasons, a resistance to leakiness by virtue of modifying a protein receptor, rather than ablating expression of a ligand, which may result in compensatory effects (e.g., buildup of other factors due to lack of negative feedback).

[0172] In some embodiments, the present disclosure includes a method for the treatment or prevention of a joint disease or condition in a subject in need thereof, the method comprising administering, to a joint of the subject, a pharmaceutical composition comprising a therapeutically effective amount of a Clustered Regularly Interspaced Short Palindromic Repeats (CRISPR) gene-editing system, the system comprising (i) a CRISPR Associated (Cas) protein; and (ii) at least one guide RNA targeting an IL1R1 gene, IL1RAP gene, TGFBR1 gene, TGFBR2 gene, IL6R gene, IL6ST gene, TNFRSF1A gene, TNFRSF1B gene, TNFRSF3 gene, TNFRSF4 gene, or TNFRSF11A gene or a combination thereof. In some embodiments, the joint disease or condition is osteoarthritis. In some embodiments, the joint disease or condition is psoriatic arthritis. In some embodiments, the joint disease or condition is gout.

[0173] In some embodiments, the present disclosure includes a method for the treatment or prevention of an arthritis. Non-limiting examples of arthritis the can be treated using the compositions and methods described herein include post-tramatic arthritis, osteoarthritis (a degenerative condition that affects the joints, most commonly the hips, knees, and hands), rheumatoid arthritis (an autoimmune disorder that causes inflammation in the joints and surrounding tissue), psoriatic arthritis (a type of arthritis that occurs in people with psoriasis, a skin condition characterized by scaly red patches), gout (a type of arthritis caused by the buildup of uric acid crystals in the joints), lupus (a chronic autoimmune disorder that can cause inflammation and damage to the joints, as well as other organs), ankylosing spondylitis (a type of arthritis that primarily affects the spine, causing inflammation and stiffness), reactive arthritis (a type of arthritis that occurs as a reaction to an infection in the body), septic arthritis (a type of arthritis caused by an infection in the joint), juvenile idiopathic arthritis (a form of arthritis that affects children under the age of 16), and fibromyalgia (a chronic pain disorder that can cause widespread pain and stiffness, including in the joints).

[0174] In some embodiments, the present disclosure includes a method for the treatment or prevention of pseudogout, Crystal arthropathies (caused by the formation of crystals in the joints, such as gout and pseudogout), or CPPD disease (calcium pyrophosphate deposition disease) also called chondroclacinosis.

[0175] In some embodiments, the present disclosure includes a method for the treatment or prevention of rheumatoid arthritis, psoriasis, asthma, inflammatory bowel disease, multiple sclerosis, Alzheimer's disease, Type 2 diabetes, cardiovascular disease, or cancer. In some embodiments, these disorders are treated by administering a CRISPR composition, as described herein, targeting an IL1 receptor, e.g., IL1R1 or IL1AP.

### B. Osteoarthritis

[0176] In one aspect, the present disclosure encompasses treatments for osteoarthritis (OA). In some embodiments, OA treatment comprises a therapeutically effective amount of a Clustered Regularly Interspaced Short Palindromic Repeats (CRISPR) gene-editing system, the system comprising: (i) a CRISPR Associated (Cas) protein; and (ii) at least one guide RNA targeting IL1R1. In some embodiments, the OA treatment comprises a CRISPR gene-editing system targeting hIL1R1. In some embodiments, the OA treatment comprises a CRISPR gene-editing system targeting cIL1R1. In some embodiments, the OA treatment comprises a CRISP gene-editing system R targeting eIL1R1. In some embodiments, the OA treatment comprises a CRISPR gene-editing system targeting fIL1R1.

[0177] In some embodiments, the CRISPR gene-editing system for the treatment of OA comprises one or more sgRNAs targeting exon 1 of hIL1R1. In some embodiments, the CRISPR gene-editing system for the treatment of OA comprises one or more sgRNAs targeting exon 2 of hIL1R1. In some embodiments, the CRISPR gene-editing system for the treatment of OA comprises one or more sgRNAs targeting exon 3 of hIL1R1. In some embodiments, the CRISPR gene-editing system for the treatment of OA comprises one or more sgRNAs targeting exon 4 of hIL1R1. In some embodiments, the CRISPR gene-editing system for the treatment of OA comprises one or more sgRNAs targeting exon 5 of hIL1R1. In some embodiments, the CRISPR gene-editing system for the treatment of OA comprises one or more sgRNAs targeting exon 6 of hIL1R1. In some embodiments, the CRISPR gene-editing system for the treatment of OA comprises one or more sgRNAs targeting exon 7 of hIL1R1. In some embodiments, the CRISPR gene-editing system for the treatment of OA comprises one or more sgRNAs targeting exon 8 of hIL1R1. In some embodiments, the CRISPR gene-editing system for the treatment of OA comprises one or more sgRNAs targeting exon 9 of hIL1R1. In some embodiments, the CRISPR gene-editing system for the treatment of OA comprises one or more sgRNAs targeting exon 10 of hIL1R1. In some embodiments, the CRISPR gene-editing system for the treatment of OA comprises one or more sgRNAs targeting exon 11 of hIL1R1. In some embodiments, the CRISPR gene-editing system for the treatment of OA comprises one or more sgRNAs targeting exon 12 of hIL1R1. In some embodiments, the CRISPR gene-editing system for the treatment of OA comprises one or more sgRNAs targeting exon 13 of hIL1R1. In some embodiments, the CRISPR gene-editing system for the treatment of OA comprises one or more sgRNAs targeting exon 14 of hIL1R1. In some embodiments, the CRISPR gene-editing system for the treatment of OA comprises one or more sgRNAs targeting exon 15 of hIL1R1. In some embodiments, the CRISPR gene-editing system for the treatment of OA comprises one or more sgRNAs targeting exon 16 of hIL1R1. In some embodiments, the CRISPR gene-editing system for the treatment of OA comprises one or more sgRNAs targeting exon 17 of hIL1R1. In some embodiments, the CRISPR gene-editing system for the treatment of OA comprises one or more sgRNAs targeting exon 18 of hIL1R1. In some embodiments, the CRISPR gene-editing system for the treatment of OA comprises one or more sgRNAs targeting exon 19 of hIL1R1. In some embodiments, the CRISPR gene-editing system for the treatment of OA comprises one or more sgRNAs targeting exon 20 of hIL1R1. In some embodiments, the CRISPR gene-editing system for the treatment of OA comprises one or more sgRNAs targeting exon 21 of hIL1R1.

[0178] In some embodiments, the CRISPR gene-editing system for the treatment of OA comprises one or more sgRNAs targeting exon 1 of cIL1R1. In some embodiments, the CRISPR gene-editing system for the treatment of OA comprises one or more sgRNAs targeting exon 2 of cIL1R1. In some embodiments, the CRISPR gene-editing system for the treatment of OA comprises one or more sgRNAs targeting exon 3 of cIL1R1. In some embodiments, the CRISPR gene-editing system for the treatment of OA comprises one or more sgRNAs targeting exon 4 of cIL1R1. In some embodiments, the CRISPR gene-editing system for the treatment of OA comprises one or more sgRNAs targeting exon 5 of cIL1R1. In some embodiments, the CRISPR gene-editing system for the treatment of OA comprises one or more sgRNAs targeting exon 6 of cIL1R1. In some embodiments, the CRISPR gene-editing system for the treatment of OA comprises one or more sgRNAs targeting exon 7 of cIL1R1. In some embodiments, the CRISPR gene-editing system for the treatment of OA comprises one or more sgRNAs targeting exon 8 of cIL1R1. In some embodiments, the CRISPR gene-editing system for the treatment of OA comprises one or more sgRNAs targeting exon 9 of cIL1R1. In some embodiments, the CRISPR gene-editing system for the treatment of OA comprises one or more sgRNAs targeting exon 10 of cIL1R1. In some embodiments, the CRISPR gene-editing system for the treatment of OA comprises one or more sgRNAs targeting exon 11 of cIL1R1. In some embodiments, the CRISPR gene-editing system for the treatment of OA comprises one or more sgRNAs targeting exon 12 of cIL1R1. In some embodiments, the CRISPR gene-editing system for the treatment of OA comprises one or more sgRNAs targeting exon 13 of cIL1R1. In some embodiments, the CRISPR gene-editing system for the treatment of OA comprises one or more sgRNAs targeting exon 14 of cIL1R1. In some embodiments, the CRISPR gene-editing system for the treatment of OA comprises one or more sgRNAs targeting exon 15 of cIL1R1. In some embodiments, the CRISPR gene-editing system for the treatment of OA comprises one or more sgRNAs targeting exon 16 of cIL1R1.

[0179] In some embodiments, the CRISPR gene-editing system for the treatment of OA comprises one or more sgRNAs targeting exon 1 of eIL1R1. In some embodiments, the CRISPR gene-editing system for the treatment of OA comprises one or more sgRNAs targeting exon 2 of eIL1R1. In some embodiments, the CRISPR gene-editing system for the treatment of OA comprises one or more sgRNAs targeting exon 3 of eIL1R1. In some embodiments, the CRISPR gene-editing system for the treatment of OA comprises one or more sgRNAs targeting exon 4 of eIL1R1. In some embodiments, the CRISPR gene-editing system for the treatment of OA comprises one or more sgRNAs targeting exon 5 of eIL1R1. In some embodiments, the CRISPR gene-editing system for the treatment of OA comprises one or more sgRNAs targeting exon 6 of eIL1R1. In some embodiments, the CRISPR gene-editing system for the treatment of OA comprises one or more sgRNAs targeting exon 7 of eIL1R1. In some embodiments, the CRISPR gene-editing system for the treatment of OA comprises one or more sgRNAs targeting exon 8 of eIL1R1. In some embodiments, the CRISPR gene-editing system for the treatment of OA comprises one or more sgRNAs targeting exon 9 of eIL1R1. In some embodiments, the CRISPR gene-editing system for the treatment of OA comprises one or more sgRNAs targeting exon 10 of eIL1R1. In some embodiments, the CRISPR gene-editing system for the treatment of OA comprises one or more sgRNAs targeting exon 11 of eIL1R1. In some embodiments, the CRISPR gene-editing system for the treatment of OA comprises one or more sgRNAs targeting exon 12 of eIL1R1. In some embodiments, the CRISPR gene-editing system for the treatment of OA comprises one or more sgRNAs targeting exon 13 of eIL1R1. In some embodiments, the CRISPR gene-editing system for the treatment of OA comprises one or more sgRNAs targeting exon 14 of eIL1R1. In some embodiments, the CRISPR gene-editing system for the treatment of OA comprises one or more sgRNAs targeting exon 15 of eIL1R1.

[0180] In some embodiments, the CRISPR gene-editing system for the treatment of OA comprises one or more sgRNAs targeting exon 1 of fIL1R1. In some embodiments, the CRISPR gene-editing system for the treatment of OA comprises one or more sgRNAs targeting exon 2 of fIL1R1. In some embodiments, the CRISPR gene-editing system for the treatment of OA comprises one or more sgRNAs targeting exon 3 of fIL1R1. In some embodiments, the CRISPR gene-editing system for the treatment of OA comprises one or more sgRNAs targeting exon 4 of fIL1R1. In some embodiments, the CRISPR gene-editing system for the treatment of OA comprises one or more sgRNAs targeting exon 5 of fIL1R1. In some embodiments, the CRISPR gene-editing system for the treatment of OA comprises one or more sgRNAs targeting exon 6 of fIL1R1. In some embodiments, the CRISPR gene-editing system for the treatment of OA comprises one or more sgRNAs targeting exon 7 of fIL1R1. In some embodiments, the CRISPR gene-editing system for the treatment of OA comprises one or more sgRNAs targeting exon 8 of fIL1R1. In some embodiments, the CRISPR gene-editing system for the treatment of OA comprises one or more sgRNAs targeting exon 9 of fIL1R1. In some embodiments, the CRISPR gene-editing system for the treatment of OA comprises one or more sgRNAs targeting exon 10 of fIL1R1. In some embodiments, the CRISPR gene-editing system for the treatment of OA comprises one or more sgRNAs targeting exon 11 of fIL1R1. In some embodiments, the CRISPR gene-editing system for the treatment of OA comprises one or more sgRNAs targeting exon 12 of fIL1R1. In some embodiments, the CRISPR gene-editing system for the treatment of OA comprises one or more sgRNAs targeting exon 13 of fIL1R1. In some embodiments, the CRISPR gene-editing system for the treatment of OA comprises one or more sgRNAs targeting exon 14 of fIL1R1. In some embodiments, the CRISPR gene-editing system for the treatment of OA comprises one or more sgRNAs targeting exon 15 of fIL1R1. In some embodiments, the CRISPR gene-editing system for the treatment of OA comprises one or more sgRNAs targeting exon 16 of fIL1R1. In some embodiments, the CRISPR gene-editing system for the treatment of OA comprises one or more sgRNAs targeting exon 17 of fIL1R1. In some embodiments, the CRISPR gene-editing system for the treatment of OA comprises one or more sgRNAs targeting exon 18 of fIL1R1.

[0181] In some embodiments, the CRISPR gene-editing system for the treatment of OA comprises one or more sgRNAs targeting IL1RAP. In some embodiments, the CRISPR gene-editing system for the treatment of OA comprises one or more sgRNAs targeting hIL1RAP. In some embodiments, the CRISPR gene-editing system for the treatment of OA comprises one or more sgRNAs targeting cIL1RAP. In some embodiments, the CRISPR gene-editing system for the treatment of OA comprises one or more sgRNAs targeting eIL1RAP. In some embodiments, the CRISPR gene-editing system for the treatment of OA comprises one or more sgRNAs targeting fIL1RAP.

[0182] In some embodiments, the CRISPR gene-editing system for the treatment of OA comprises one or more sgRNAs targeting exon 1 of hIL1RAP. In some embodiments, the CRISPR gene-editing system for the treatment of OA comprises one or more sgRNAs targeting exon 2 of hIL1RAP. In some embodiments, the CRISPR gene-editing system for the treatment of OA comprises one or more sgRNAs targeting exon 3 of hIL1RAP. In some embodiments, the CRISPR gene-editing system for the treatment of OA comprises one or more sgRNAs targeting exon 4 of hIL1RAP. In some embodiments, the CRISPR gene-editing system for the treatment of OA comprises one or more sgRNAs targeting exon 5 of hIL1RAP. In some embodiments, the CRISPR gene-editing system for the treatment of OA comprises one or more sgRNAs targeting exon 6 of hIL1RAP. In some embodiments, the CRISPR gene-editing system for the treatment of OA comprises one or more sgRNAs targeting exon 7 of hIL1RAP. In some embodiments, the CRISPR gene-editing system for the treatment of OA comprises one or more sgRNAs targeting exon 8 of hIL1RAP. In some embodiments, the CRISPR gene-editing system for the treatment of OA comprises one or more sgRNAs targeting exon 9 of hIL1RAP. In some embodiments, the CRISPR gene-editing system for the treatment of OA comprises one or more sgRNAs targeting exon 10 of hIL1RAP. In some embodiments, the CRISPR gene-editing system for the treatment of OA comprises one or more sgRNAs targeting exon 11 of hIL1RAP. In some embodiments, the CRISPR gene-editing system for the treatment of OA comprises one or more sgRNAs targeting exon 12 of hIL1RAP. In some embodiments, the CRISPR gene-editing system for the treatment of OA comprises one or more sgRNAs targeting exon 13 of hIL1RAP. In some embodiments, the CRISPR gene-editing system for the treatment of OA comprises one or more sgRNAs targeting exon 14 of hIL1RAP. In some embodiments, the CRISPR gene-editing system for the treatment of OA comprises one or more sgRNAs targeting exon 15 of hIL1RAP. In some embodiments, the CRISPR gene-editing system for the treatment of OA comprises one or more sgRNAs targeting exon 16 of hIL1RAP. In some embodiments, the CRISPR gene-editing system for the treatment of OA comprises one or more sgRNAs targeting exon 17 of hIL1RAP.

[0183] In some embodiments, the CRISPR gene-editing system for the treatment of OA comprises one or more sgRNAs targeting exon 1 of cIL1RAP. In some embodiments, the CRISPR gene-editing system for the treatment of OA comprises one or more sgRNAs targeting exon 2 of cIL1RAP. In some embodiments, the CRISPR gene-editing system for the treatment of OA comprises one or more sgRNAs targeting exon 3 of cIL1RAP. In some embodiments, the CRISPR gene-editing system for the treatment of OA comprises one or more sgRNAs targeting exon 4 of cIL1RAP. In some embodiments, the CRISPR gene-editing system for the treatment of OA comprises one or more sgRNAs targeting exon 5 of cIL1RAP. In some embodiments, the CRISPR gene-editing system for the treatment of OA comprises one or more sgRNAs targeting exon 6 of cIL1RAP. In some embodiments, the CRISPR gene-editing system for the treatment of OA comprises one or more sgRNAs targeting exon 7 of cIL1RAP. In some embodiments, the CRISPR gene-editing system for the treatment of OA comprises one or more sgRNAs targeting exon 8 of cIL1RAP. In some embodiments, the CRISPR gene-editing system for the treatment of OA comprises one or more sgRNAs targeting exon 9 of cIL1RAP. In some embodiments, the CRISPR gene-editing system for the treatment of OA comprises one or more sgRNAs targeting exon 10 of cIL1RAP. In some embodiments, the CRISPR gene-editing system for the treatment of OA comprises one or more sgRNAs targeting exon 11 of cIL1RAP. In some embodiments, the CRISPR gene-editing system for the treatment of OA comprises one or more sgRNAs targeting exon 12 of cIL1RAP. In some embodiments, the CRISPR gene-editing system for the treatment of OA comprises one or more sgRNAs targeting exon 13 of cIL1RAP. In some embodiments, the CRISPR gene-editing system for the treatment of OA comprises one or more sgRNAs targeting exon 14 of cIL1RAP. In some embodiments, the CRISPR gene-editing system for the treatment of OA comprises one or more sgRNAs targeting exon 15 of cIL1RAP. In some embodiments, the CRISPR gene-editing system for the treatment of OA comprises one or more sgRNAs targeting exon 16 of cIL1RAP.

[0184] In some embodiments, the CRISPR gene-editing system for the treatment of OA comprises one or more sgRNAs targeting exon 1 of eIL1RAP. In some embodiments, the CRISPR gene-editing system for the treatment of OA comprises one or more sgRNAs targeting exon 2 of eIL1RAP. In some embodiments, the CRISPR gene-editing system for the treatment of OA comprises one or more sgRNAs targeting exon 3 of eIL1RAP. In some embodiments, the CRISPR gene-editing system for the treatment of OA comprises one or more sgRNAs targeting exon 4 of eIL1RAP. In some embodiments, the CRISPR gene-editing system for the treatment of OA comprises one or more sgRNAs targeting exon 5 of eIL1RAP. In some embodiments, the CRISPR gene-editing system for the treatment of OA comprises one or more sgRNAs targeting exon 6 of eIL1RAP. In some embodiments, the CRISPR gene-editing system for the treatment of OA comprises one or more sgRNAs targeting exon 7 of eIL1RAP. In some embodiments, the CRISPR gene-editing system for the treatment of OA comprises one or more sgRNAs targeting exon 8 of eIL1RAP. In some embodiments, the CRISPR gene-editing system for the treatment of OA comprises one or more sgRNAs targeting exon 9 of eIL1RAP. In some embodiments, the CRISPR gene-editing system for the treatment of OA comprises one or more sgRNAs targeting exon 10 of eIL1RAP. In some embodiments, the CRISPR gene-editing system for the treatment of OA comprises one or more sgRNAs targeting exon 11 of eIL1RAP. In some embodiments, the CRISPR gene-editing system for the treatment of OA comprises one or more sgRNAs targeting exon 12 of eIL1RAP. In some embodiments, the CRISPR gene-editing system for the treatment of OA comprises one or more sgRNAs targeting exon 13 of eIL1RAP.

[0185] In some embodiments, the CRISPR gene-editing system for the treatment of OA comprises one or more sgRNAs targeting exon 1 of fIL1RAP. In some embodiments, the CRISPR gene-editing system for the treatment of OA comprises one or more sgRNAs targeting exon 2 of fIL1RAP. In some embodiments, the CRISPR gene-editing system for the treatment of OA comprises one or more sgRNAs targeting exon 3 of fIL1RAP. In some embodiments, the CRISPR gene-editing system for the treatment of OA comprises one or more sgRNAs targeting exon 4 of fIL1RAP. In some embodiments, the CRISPR gene-editing system for the treatment of OA comprises one or more sgRNAs targeting exon 5 of fIL1RAP. In some embodiments, the CRISPR gene-editing system for the treatment of OA comprises one or more sgRNAs targeting exon 6 of fIL1RAP. In some embodiments, the CRISPR gene-editing system for the treatment of OA comprises one or more sgRNAs targeting exon 7 of fIL1RAP. In some embodiments, the CRISPR gene-editing system for the treatment of OA comprises one or more sgRNAs targeting exon 8 of fIL1RAP. In some embodiments, the CRISPR gene-editing system for the treatment of OA comprises one or more sgRNAs targeting exon 9 of fIL1RAP. In some embodiments, the CRISPR gene-editing system for the treatment of OA comprises one or more sgRNAs targeting exon 10 of fIL1RAP. In some embodiments, the CRISPR gene-editing system for the treatment of OA comprises one or more sgRNAs targeting exon 11 of fIL1RAP. In some embodiments, the CRISPR gene-editing system for the treatment of OA comprises one or more sgRNAs targeting exon 12 of fIL1RAP. In some embodiments, the CRISPR gene-editing system for the treatment of OA comprises one or more sgRNAs targeting exon 13 of fIL1RAP. In some embodiments, the CRISPR gene-editing system for the treatment of OA comprises one or more sgRNAs targeting exon 14 of fIL1RAP.

[0186] In some embodiments, the CRISPR gene-editing system for the treatment of OA comprises one or more sgRNAs targeting TGFBR1. In some embodiments, the CRISPR gene-editing system for the treatment of OA comprises one or more sgRNAs targeting hTGFBR1. In some embodiments, the CRISPR gene-editing system for the treatment of OA comprises one or more sgRNAs targeting cTGFBR1. In some embodiments, the CRISPR gene-editing system for the treatment of OA comprises one or more sgRNAs targeting e TGFBR1. In some embodiments, the CRISPR gene-editing system for the treatment of OA comprises one or more sgRNAs targeting fTGFBR1.

[0187] In some embodiments, the CRISPR gene-editing system for the treatment of OA comprises one or more sgRNAs targeting exon 1 of hTGFBR1. In some embodiments, the CRISPR gene-editing system for the treatment of OA comprises one or more sgRNAs targeting exon 2 of hTGFBR1. In some embodiments, the CRISPR gene-editing system for the treatment of OA comprises one or more sgRNAs targeting exon 3 of hTGFBR1. In some embodiments, the CRISPR gene-editing system for the treatment of OA comprises one or more sgRNAs targeting exon 4 of hTGFBR1. In some embodiments, the CRISPR gene-editing system for the treatment of OA comprises one or more sgRNAs targeting exon 5 of hTGFBR1. In some embodiments, the CRISPR gene-editing system for the treatment of OA comprises one or more sgRNAs targeting exon 6 of hTGFBR1. In some embodiments, the CRISPR gene-editing system for the treatment of OA comprises one or more sgRNAs targeting exon 7 of hTGFBR1. In some embodiments, the CRISPR gene-editing system for the treatment of OA comprises one or more sgRNAs targeting exon 8 of hTGFBR1. In some embodiments, the CRISPR gene-editing system for the treatment of OA comprises one or more sgRNAs targeting exon 9 of hTGFBR1. In some embodiments, the CRISPR gene-editing system for the treatment of OA comprises one or more sgRNAs targeting exon 10 of hTGFBR1. In some embodiments, the CRISPR gene-editing system for the treatment of OA comprises one or more sgRNAs targeting exon 11 of hTGFBR1.

[0188] In some embodiments, the CRISPR gene-editing system for the treatment of OA comprises one or more sgRNAs targeting exon 1 of cTGFBR1. In some embodiments, the CRISPR gene-editing system for the treatment of OA comprises one or more sgRNAs targeting exon 2 of cTGFBR1. In some embodiments, the CRISPR gene-editing system for the treatment of OA comprises one or more sgRNAs targeting exon 3 of cTGFBR1. In some embodiments, the CRISPR gene-editing system for the treatment of OA comprises one or more sgRNAs targeting exon 4 of cTGFBR1. In some embodiments, the CRISPR gene-editing system for the treatment of OA comprises one or more sgRNAs targeting exon 5 of cTGFBR1. In some embodiments, the CRISPR gene-editing system for the treatment of OA comprises one or more sgRNAs targeting exon 6 of cTGFBR1. In some embodiments, the CRISPR gene-editing system for the treatment of OA comprises one or more sgRNAs targeting exon 7 of cTGFBR1. In some embodiments, the CRISPR gene-editing system for the treatment of OA comprises one or more sgRNAs targeting exon 8 of cTGFBR1. In some embodiments, the CRISPR gene-editing system for the treatment of OA comprises one or more sgRNAs targeting exon 9 of cTGFBR1.

[0189] In some embodiments, the CRISPR gene-editing system for the treatment of OA comprises one or more sgRNAs targeting exon 1 of eTGFBR1. In some embodiments, the CRISPR gene-editing system for the treatment of OA comprises one or more sgRNAs targeting exon 2 of eTGFBR1. In some embodiments, the CRISPR gene-editing system for the treatment of OA comprises one or more sgRNAs targeting exon 3 of eTGFBR1. In some embodiments, the CRISPR gene-editing system for the treatment of OA comprises one or more sgRNAs targeting exon 4 of eTGFBR1. In some embodiments, the CRISPR gene-editing system for the treatment of OA comprises one or more sgRNAs targeting exon 5 of eTGFBR1. In some embodiments, the CRISPR gene-editing system for the treatment of OA comprises one or more sgRNAs targeting exon 6 of eTGFBR1. In some embodiments, the CRISPR gene-editing system for the treatment of OA comprises one or more sgRNAs targeting exon 7 of eTGFBR1. In some embodiments, the CRISPR gene-editing system for the treatment of OA comprises one or more sgRNAs targeting exon 8 of eTGFBR1. In some embodiments, the CRISPR gene-editing system for the treatment of OA comprises one or more sgRNAs targeting exon 9 of eTGFBR1. In some embodiments, the CRISPR gene-editing system for the treatment of OA comprises one or more sgRNAs targeting exon 10 of eTGFBR1. In some embodiments, the CRISPR gene-editing system for the treatment of OA comprises one or more sgRNAs targeting exon 11 of eTGFBR1. In some embodiments, the CRISPR gene-editing system for the treatment of OA comprises one or more sgRNAs targeting exon 12 of eTGFBR1.

[0190] In some embodiments, the CRISPR gene-editing system for the treatment of OA comprises one or more sgRNAs targeting exon 1 of fTGFBR1. In some embodiments, the CRISPR gene-editing system for the treatment of OA comprises one or more sgRNAs targeting exon 2 of fTGFBR1. In some embodiments, the CRISPR gene-editing system for the treatment of OA comprises one or more sgRNAs targeting exon 3 of fTGFBR1. In some embodiments, the CRISPR gene-editing system for the treatment of OA comprises one or more sgRNAs targeting exon 4 of fTGFBR1. In some embodiments, the CRISPR gene-editing system for the treatment of OA comprises one or more sgRNAs targeting exon 5 of fTGFBR1. In some embodiments, the CRISPR gene-editing system for the treatment of OA comprises one or more sgRNAs targeting exon 6 of fTGFBR1. In some embodiments, the CRISPR gene-editing system for the treatment of OA comprises one or more sgRNAs targeting exon 7 of fTGFBR1. In some embodiments, the CRISPR gene-editing system for the treatment of OA comprises one or more sgRNAs targeting exon 8 of fTGFBR1. In some embodiments, the CRISPR gene-editing system for the treatment of OA comprises one or more sgRNAs targeting exon 9 of fTGFBR1. In some embodiments, the CRISPR gene-editing system for the treatment of OA comprises one or more sgRNAs targeting exon 10 of fTGFBR1. In some embodiments, the CRISPR gene-editing system for the treatment of OA comprises one or more sgRNAs targeting exon 11 of fTGFBR1.

[0191] In some embodiments, the CRISPR gene-editing system for the treatment of OA comprises one or more sgRNAs targeting TGFBR2. In some embodiments, the CRISPR gene-editing system for the treatment of OA comprises one or more sgRNAs targeting hTGFBR2. In some embodiments, the CRISPR gene-editing system for the treatment of OA comprises one or more sgRNAs targeting cTGFBR2. In some embodiments, the CRISPR gene-editing system for the treatment of OA comprises one or more sgRNAs targeting eTGFBR2. In some embodiments, the CRISPR gene-editing system for the treatment of OA comprises one or more sgRNAs targeting fTGFBR2.

[0192] In some embodiments, the CRISPR gene-editing system for the treatment of OA comprises one or more sgRNAs targeting exon 1 of hTGFBR2. In some embodiments, the CRISPR gene-editing system for the treatment of OA comprises one or more sgRNAs targeting exon 2 of hTGFBR2. In some embodiments, the CRISPR gene-editing system for the treatment of OA comprises one or more sgRNAs targeting exon 3 of hTGFBR2. In some embodiments, the CRISPR gene-editing system for the treatment of OA comprises one or more sgRNAs targeting exon 4 of hTGFBR2. In some embodiments, the CRISPR gene-editing system for the treatment of OA comprises one or more sgRNAs targeting exon 5 of hTGFBR2. In some embodiments, the CRISPR gene-editing system for the treatment of OA comprises one or more sgRNAs targeting exon 6 of hTGFBR2. In some embodiments, the CRISPR gene-editing system for the treatment of OA comprises one or more sgRNAs targeting exon 7 of hTGFBR2. In some embodiments, the CRISPR gene-editing system for the treatment of OA comprises one or more sgRNAs targeting exon 8 of hTGFBR2. In some embodiments, the CRISPR gene-editing system for the treatment of OA comprises one or more sgRNAs targeting exon 9 of hTGFBR2.

[0193] In some embodiments, the CRISPR gene-editing system for the treatment of OA comprises one or more sgRNAs targeting exon 1 of cTGFBR2. In some embodiments, the CRISPR gene-editing system for the treatment of OA comprises one or more sgRNAs targeting exon 2 of cTGFBR2. In some embodiments, the CRISPR gene-editing system for the treatment of OA comprises one or more sgRNAs targeting exon 3 of cTGFBR2. In some embodiments, the CRISPR gene-editing system for the treatment of OA comprises one or more sgRNAs targeting exon 4 of cTGFBR2. In some embodiments, the CRISPR gene-editing system for the treatment of OA comprises one or more sgRNAs targeting exon 5 of cTGFBR2. In some embodiments, the CRISPR gene-editing system for the treatment of OA comprises one or more sgRNAs targeting exon 6 of cTGFBR2. In some embodiments, the CRISPR gene-editing system for the treatment of OA comprises one or more sgRNAs targeting exon 7 of cTGFBR2. In some embodiments, the CRISPR gene-editing system for the treatment of OA comprises one or more sgRNAs targeting exon 8 of cTGFBR2.

[0194] In some embodiments, the CRISPR gene-editing system for the treatment of OA comprises one or more sgRNAs targeting exon 1 of eTGFBR2. In some embodiments, the CRISPR gene-editing system for the treatment of OA comprises one or more sgRNAs targeting exon 2 of eTGFBR2. In some embodiments, the CRISPR gene-editing system for the treatment of OA comprises one or more sgRNAs targeting exon 3 of eTGFBR2. In some embodiments, the CRISPR gene-editing system for the treatment of OA comprises one or more sgRNAs targeting exon 4 of eTGFBR2. In some embodiments, the CRISPR gene-editing system for the treatment of OA comprises one or more sgRNAs targeting exon 5 of eTGFBR2. In some embodiments, the CRISPR gene-editing system for the treatment of OA comprises one or more sgRNAs targeting exon 6 of eTGFBR2. In some embodiments, the CRISPR gene-editing system for the treatment of OA comprises one or more sgRNAs targeting exon 7 of eTGFBR2. In some embodiments, the CRISPR gene-editing system for the treatment of OA comprises one or more sgRNAs targeting exon 8 of eTGFBR2. In some embodiments, the CRISPR gene-editing system for the treatment of OA comprises one or more sgRNAs targeting exon 9 of eTGFBR2. In some embodiments, the CRISPR gene-editing system for the treatment of OA comprises one or more sgRNAs targeting exon 10 of eTGFBR2.

[0195] In some embodiments, the CRISPR gene-editing system for the treatment of OA comprises one or more sgRNAs targeting exon 1 of fTGFBR2. In some embodiments, the CRISPR gene-editing system for the treatment of OA comprises one or more sgRNAs targeting exon 2 of fTGFBR2. In some embodiments, the CRISPR gene-editing system for the treatment of OA comprises one or more sgRNAs targeting exon 3 of fTGFBR2. In some embodiments, the CRISPR gene-editing system for the treatment of OA comprises one or more sgRNAs targeting exon 4 of fTGFBR2. In some embodiments, the CRISPR gene-editing system for the treatment of OA comprises one or more sgRNAs targeting exon 5 of fTGFBR2. In some embodiments, the CRISPR gene-editing system for the treatment of OA comprises one or more sgRNAs targeting exon 6 of fTGFBR2. In some embodiments, the CRISPR gene-editing system for the treatment of OA comprises one or more sgRNAs targeting exon 7 of fTGFBR2. In some embodiments, the CRISPR gene-editing system for the treatment of OA comprises one or more sgRNAs targeting exon 8 of fTGFBR2.

[0196] In some embodiments, the CRISPR gene-editing system for the treatment of OA comprises one or more sgRNAs targeting IL6R. In some embodiments, the CRISPR gene-editing system for the treatment of OA comprises one or more sgRNAs targeting hIL6R. In some embodiments, the CRISPR gene-editing system for the treatment of OA comprises one or more sgRNAs targeting cIL6R. In some embodiments, the CRISPR gene-editing system for the treatment of OA comprises one or more sgRNAs targeting eIL6R. In some embodiments, the CRISPR gene-editing system for the treatment of OA comprises one or more sgRNAs targeting fIL6R.

[0197] In some embodiments, the CRISPR gene-editing system for the treatment of OA comprises one or more sgRNAs targeting exon 1 of hIL6R. In some embodiments, the CRISPR gene-editing system for the treatment of OA comprises one or more sgRNAs targeting exon 2 of hIL6R. In some embodiments, the CRISPR gene-editing system for the treatment of OA comprises one or more sgRNAs targeting exon 3 of hIL6R. In some embodiments, the CRISPR gene-editing system for the treatment of OA comprises one or more sgRNAs targeting exon 4 of hIL6R. In some embodiments, the CRISPR gene-editing system for the treatment of OA comprises one or more sgRNAs targeting exon 5 of hIL6R. In some embodiments, the CRISPR gene-editing system for the treatment of OA comprises one or more sgRNAs targeting exon 6 of hIL6R. In some embodiments, the CRISPR gene-editing system for the treatment of OA comprises one or more sgRNAs targeting exon 7 of hIL6R. In some embodiments, the CRISPR gene-editing system for the treatment of OA comprises one or more sgRNAs targeting exon 8 of hIL6R. In some embodiments, the CRISPR gene-editing system for the treatment of OA comprises one or more sgRNAs targeting exon 9 of hIL6R. In some embodiments, the CRISPR gene-editing system for the treatment of OA comprises one or more sgRNAs targeting exon 10 of hIL6R. In some embodiments, the CRISPR gene-editing system for the treatment of OA comprises one or more sgRNAs targeting exon 11 of hIL6R In some embodiments, the CRISPR gene-editing system for the treatment of OA comprises one or more sgRNAs targeting exon 12 of hIL6R. In some embodiments, the CRISPR gene-editing system for the treatment of OA comprises one or more sgRNAs targeting exon 13 of hIL6R. In some embodiments, the CRISPR gene-editing system for the treatment of OA comprises one or more sgRNAs targeting exon 14 of hIL6R. In some embodiments, the CRISPR gene-editing system for the treatment of OA comprises one or more sgRNAs targeting exon 15 of hIL6R.

[0198] In some embodiments, the CRISPR gene-editing system for the treatment of OA comprises one or more sgRNAs targeting exon 1 of cIL6R. In some embodiments, the CRISPR gene-editing system for the treatment of OA comprises one or more sgRNAs targeting exon 2 of cIL6R. In some embodiments, the CRISPR gene-editing system for the treatment of OA comprises one or more sgRNAs targeting exon 3 of cIL6R. In some embodiments, the CRISPR gene-editing system for the treatment of OA comprises one or more sgRNAs targeting exon 4 of cIL6R. In some embodiments, the CRISPR gene-editing system for the treatment of OA comprises one or more sgRNAs targeting exon 5 of cIL6R. In some embodiments, the CRISPR gene-editing system for the treatment of OA comprises one or more sgRNAs targeting exon 6 of cIL6R. In some embodiments, the CRISPR gene-editing system for the treatment of OA comprises one or more sgRNAs targeting exon 7 of cIL6R. In some embodiments, the CRISPR gene-editing system for the treatment of OA comprises one or more sgRNAs targeting exon 8 of cIL6R. In some embodiments, the CRISPR gene-editing system for the treatment of OA comprises one or more sgRNAs targeting exon 9 of cIL6R. In some embodiments, the CRISPR gene-editing system for the treatment of OA comprises one or more sgRNAs targeting exon 10 of cIL6R. In some embodiments, the CRISPR gene-editing system for the treatment of OA comprises one or more sgRNAs targeting exon 11 of cIL6R. In some embodiments, the CRISPR gene-editing system for the treatment of OA comprises one or more sgRNAs targeting exon 12 of cIL6R. In some embodiments, the CRISPR gene-editing system for the treatment of OA comprises one or more sgRNAs targeting exon 13 of cIL6R.

[0199] In some embodiments, the CRISPR gene-editing system for the treatment of OA comprises one or more sgRNAs targeting exon 1 of eIL6R. In some embodiments, the CRISPR gene-editing system for the treatment of OA comprises one or more sgRNAs targeting exon 2 of eIL6R. In some embodiments, the CRISPR gene-editing system for the treatment of OA comprises one or more sgRNAs targeting exon 3 of eIL6R. In some embodiments, the CRISPR gene-editing system for the treatment of OA comprises one or more sgRNAs targeting exon 4 of eIL6R. In some embodiments, the CRISPR gene-editing system for the treatment of OA comprises one or more sgRNAs targeting exon 5 of eIL6R. In some embodiments, the CRISPR gene-editing system for the treatment of OA comprises one or more sgRNAs targeting exon 6 of eIL6R. In some embodiments, the CRISPR gene-editing system for the treatment of OA comprises one or more sgRNAs targeting exon 7 of eIL6R. In some embodiments, the CRISPR gene-editing system for the treatment of OA comprises one or more sgRNAs targeting exon 8 of eIL6R. In some embodiments, the CRISPR gene-editing system for the treatment of OA comprises one or more sgRNAs targeting exon 9 of eIL6R. In some embodiments, the CRISPR gene-editing system for the treatment of OA comprises one or more sgRNAs targeting exon 10 of eIL6R. In some embodiments, the CRISPR gene-editing system for the treatment of OA comprises one or more sgRNAs targeting exon 11 of eIL6R.

[0200] In some embodiments, the CRISPR gene-editing system for the treatment of OA comprises one or more sgRNAs targeting exon 1 of fIL6R. In some embodiments, the CRISPR gene-editing system for the treatment of OA comprises one or more sgRNAs targeting exon 2 of fIL6R. In some embodiments, the CRISPR gene-editing system for the treatment of OA comprises one or more sgRNAs targeting exon 3 of fIL6R. In some embodiments, the CRISPR gene-editing system for the treatment of OA comprises one or more sgRNAs targeting exon 4 of fIL6R. In some embodiments, the CRISPR gene-editing system for the treatment of OA comprises one or more sgRNAs targeting exon 5 of fIL6R. In some embodiments, the CRISPR gene-editing system for the treatment of OA comprises one or more sgRNAs targeting exon 6 of fIL6R. In some embodiments, the CRISPR gene-editing system for the treatment of OA comprises one or more sgRNAs targeting exon 7 of fIL6R. In some embodiments, the CRISPR gene-editing system for the treatment of OA comprises one or more sgRNAs targeting exon 8 of fIL6R. In some embodiments, the CRISPR gene-editing system for the treatment of OA comprises one or more sgRNAs targeting exon 9 of fIL6R. In some embodiments, the CRISPR gene-editing system for the treatment of OA comprises one or more sgRNAs targeting exon 10 of fIL6R.

[0201] In some embodiments, the CRISPR gene-editing system for the treatment of OA comprises one or more sgRNAs targeting IL6ST. In some embodiments, the CRISPR gene-editing system for the treatment of OA comprises one or more sgRNAs targeting hIL6ST. In some embodiments, the CRISPR gene-editing system for the treatment of OA comprises one or more sgRNAs targeting cIL6ST. In some embodiments, the CRISPR gene-editing system for the treatment of OA comprises one or more sgRNAs targeting eIL6ST. In some embodiments, the CRISPR gene-editing system for the treatment of OA comprises one or more sgRNAs targeting fIL6ST.

[0202] In some embodiments, the CRISPR gene-editing system for the treatment of OA comprises one or more sgRNAs targeting exon 1 of hIL6ST. In some embodiments, the CRISPR gene-editing system for the treatment of OA comprises one or more sgRNAs targeting exon 2 of hIL6ST. In some embodiments, the CRISPR gene-editing system for the treatment of OA comprises one or more sgRNAs targeting exon 3 of hIL6ST. In some embodiments, the CRISPR gene-editing system for the treatment of OA comprises one or more sgRNAs targeting exon 4 of hIL6ST. In some embodiments, the CRISPR gene-editing system for the treatment of OA comprises one or more sgRNAs targeting exon 5 of hIL6ST. In some embodiments, the CRISPR gene-editing system for the treatment of OA comprises one or more sgRNAs targeting exon 6 of hIL6ST. In some embodiments, the CRISPR gene-editing system for the treatment of OA comprises one or more sgRNAs targeting exon 7 of hIL6ST. In some embodiments, the CRISPR gene-editing system for the treatment of OA comprises one or more sgRNAs targeting exon 8 of hIL6ST. In some embodiments, the CRISPR gene-editing system for the treatment of OA comprises one or more sgRNAs targeting exon 9 of hIL6ST. In some embodiments, the CRISPR gene-editing system for the treatment of OA comprises one or more sgRNAs targeting exon 10 of hIL6ST. In some embodiments, the CRISPR gene-editing system for the treatment of OA comprises one or more sgRNAs targeting exon 11 of hIL6ST. In some embodiments, the CRISPR gene-editing system for the treatment of OA comprises one or more sgRNAs targeting exon 12 of hIL6ST. In some embodiments, the CRISPR gene-editing system for the treatment of OA comprises one or more sgRNAs targeting exon 13 of hIL6ST. In some embodiments, the CRISPR gene-editing system for the treatment of OA comprises one or more sgRNAs targeting exon 14 of hIL6ST. In some embodiments, the CRISPR gene-editing system for the treatment of OA comprises one or more sgRNAs targeting exon 15 of hIL6ST. In some embodiments, the CRISPR gene-editing system for the treatment of OA comprises one or more sgRNAs targeting exon 16 of hIL6ST. In some embodiments, the CRISPR gene-editing system for the treatment of OA comprises one or more sgRNAs targeting exon 17 of hIL6ST. In some embodiments, the CRISPR gene-editing system for the treatment of OA comprises one or more sgRNAs targeting exon 18 of hIL6ST. In some embodiments, the CRISPR gene-editing system for the treatment of OA comprises one or more sgRNAs targeting exon 19 of hIL6ST.

[0203] In some embodiments, the CRISPR gene-editing system for the treatment of OA comprises one or more sgRNAs targeting exon 1 of cIL6ST. In some embodiments, the CRISPR gene-editing system for the treatment of OA comprises one or more sgRNAs targeting exon 2 of cIL6ST. In some embodiments, the CRISPR gene-editing system for the treatment of OA comprises one or more sgRNAs targeting exon 3 of cIL6ST. In some embodiments, the CRISPR gene-editing system for the treatment of OA comprises one or more sgRNAs targeting exon 4 of cIL6ST. In some embodiments, the CRISPR gene-editing system for the treatment of OA comprises one or more sgRNAs targeting exon 5 of cIL6ST. In some embodiments, the CRISPR gene-editing system for the treatment of OA comprises one or more sgRNAs targeting exon 6 of cIL6ST. In some embodiments, the CRISPR gene-editing system for the treatment of OA comprises one or more sgRNAs targeting exon 7 of cIL6ST. In some embodiments, the CRISPR gene-editing system for the treatment of OA comprises one or more sgRNAs targeting exon 8 of cIL6ST. In some embodiments, the CRISPR gene-editing system for the treatment of OA comprises one or more sgRNAs targeting exon 9 of cIL6ST. In some embodiments, the CRISPR gene-editing system for the treatment of OA comprises one or more sgRNAs targeting exon 10 of cIL6ST. In some embodiments, the CRISPR gene-editing system for the treatment of OA comprises one or more sgRNAs targeting exon 11 of cIL6ST In some embodiments, the CRISPR gene-editing system for the treatment of OA comprises one or more sgRNAs targeting exon 12 of cIL6ST. In some embodiments, the CRISPR gene-editing system for the treatment of OA comprises one or more sgRNAs targeting exon 13 of cIL6ST. In some embodiments, the CRISPR gene-editing system for the treatment of OA comprises one or more sgRNAs targeting exon 14 of cIL6ST. In some embodiments, the CRISPR gene-editing system for the treatment of OA comprises one or more sgRNAs targeting exon 15 of cIL6ST. In some embodiments, the CRISPR gene-editing system for the treatment of OA comprises one or more sgRNAs targeting exon 16 of cIL6ST. In some embodiments, the CRISPR gene-editing system for the treatment of OA comprises one or more sgRNAs targeting exon 17 of cIL6ST. In some embodiments, the CRISPR gene-editing system for the treatment of OA comprises one or more sgRNAs targeting exon 18 of cIL6ST.

[0204] In some embodiments, the CRISPR gene-editing system for the treatment of OA comprises one or more sgRNAs targeting exon 1 of eIL6ST. In some embodiments, the CRISPR gene-editing system for the treatment of OA comprises one or more sgRNAs targeting exon 2 of eIL6ST. In some embodiments, the CRISPR gene-editing system for the treatment of OA comprises one or more sgRNAs targeting exon 3 of eIL6ST. In some embodiments, the CRISPR gene-editing system for the treatment of OA comprises one or more sgRNAs targeting exon 4 of eIL6ST. In some embodiments, the CRISPR gene-editing system for the treatment of OA comprises one or more sgRNAs targeting exon 5 of eIL6ST. In some embodiments, the CRISPR gene-editing system for the treatment of OA comprises one or more sgRNAs targeting exon 6 of eIL6ST. In some embodiments, the CRISPR gene-editing system for the treatment of OA comprises one or more sgRNAs targeting exon 7 of eIL6ST. In some embodiments, the CRISPR gene-editing system for the treatment of OA comprises one or more sgRNAs targeting exon 8 of eIL6ST. In some embodiments, the CRISPR gene-editing system for the treatment of OA comprises one or more sgRNAs targeting exon 9 of eIL6ST. In some embodiments, the CRISPR gene-editing system for the treatment of OA comprises one or more sgRNAs targeting exon 10 of eIL6ST. In some embodiments, the CRISPR gene-editing system for the treatment of OA comprises one or more sgRNAs targeting exon 11 of eIL6ST In some embodiments, the CRISPR gene-editing system for the treatment of OA comprises one or more sgRNAs targeting exon 12 of eIL6ST. In some embodiments, the CRISPR gene-editing system for the treatment of OA comprises one or more sgRNAs targeting exon 13 of eIL6ST. In some embodiments, the CRISPR gene-editing system for the treatment of OA comprises one or more sgRNAs targeting exon 14 of eIL6ST. In some embodiments, the CRISPR gene-editing system for the treatment of OA comprises one or more sgRNAs targeting exon 15 of eIL6ST. In some embodiments, the CRISPR gene-editing system for the treatment of OA comprises one or more sgRNAs targeting exon 16 of eIL6ST. In some embodiments, the CRISPR gene-editing system for the treatment of OA comprises one or more sgRNAs targeting exon 17 of eIL6ST. In some embodiments, the CRISPR gene-editing system for the treatment of OA comprises one or more sgRNAs targeting exon 18 of eIL6ST.

[0205] In some embodiments, the CRISPR gene-editing system for the treatment of OA comprises one or more sgRNAs targeting exon 1 of fIL6ST. In some embodiments, the CRISPR gene-editing system for the treatment of OA comprises one or more sgRNAs targeting exon 2 of fIL6ST. In some embodiments, the CRISPR gene-editing system for the treatment of OA comprises one or more sgRNAs targeting exon 3 of fIL6ST. In some embodiments, the CRISPR gene-editing system for the treatment of OA comprises one or more sgRNAs targeting exon 4 of fIL6ST. In some embodiments, the CRISPR gene-editing system for the treatment of OA comprises one or more sgRNAs targeting exon 5 of fIL6ST. In some embodiments, the CRISPR gene-editing system for the treatment of OA comprises one or more sgRNAs targeting exon 6 of fIL6ST. In some embodiments, the CRISPR gene-editing system for the treatment of OA comprises one or more sgRNAs targeting exon 7 of fIL6ST. In some embodiments, the CRISPR gene-editing system for the treatment of OA comprises one or more sgRNAs targeting exon 8 of fIL6ST. In some embodiments, the CRISPR gene-editing system for the treatment of OA comprises one or more sgRNAs targeting exon 9 of fIL6ST. In some embodiments, the CRISPR gene-editing system for the treatment of OA comprises one or more sgRNAs targeting exon 10 of fIL6ST. In some embodiments, the CRISPR gene-editing system for the treatment of OA comprises one or more sgRNAs targeting exon 11 of fIL6ST In some embodiments, the CRISPR gene-editing system for the treatment of OA comprises one or more sgRNAs targeting exon 12 of fIL6ST. In some embodiments, the CRISPR gene-editing system for the treatment of OA comprises one or more sgRNAs targeting exon 13 of fIL6ST. In some embodiments, the CRISPR gene-editing system for the treatment of OA comprises one or more sgRNAs targeting exon 14 of fIL6ST. In some embodiments, the CRISPR gene-editing system for the treatment of OA comprises one or more sgRNAs targeting exon 15 of fIL6ST. In some embodiments, the CRISPR gene-editing system for the treatment of OA comprises one or more sgRNAs targeting exon 16 of fIL6ST. In some embodiments, the CRISPR gene-editing system for the treatment of OA comprises one or more sgRNAs targeting exon 17 of fIL6ST. In some embodiments, the CRISPR gene-editing system for the treatment of OA comprises one or more sgRNAs targeting exon 18 of fIL6ST. In some embodiments, the CRISPR gene-editing system for the treatment of OA comprises one or more sgRNAs targeting exon 19 of fIL6ST. In some embodiments, the CRISPR gene-editing system for the treatment of OA comprises one or more sgRNAs targeting exon 20 of fIL6ST.

[0206] In some embodiments, the CRISPR gene-editing system for the treatment of OA comprises one or more sgRNAs targeting TNFRSF1A. In some embodiments, the CRISPR gene-editing system for the treatment of OA comprises one or more sgRNAs targeting hTNFRSF1A. In some embodiments, the CRISPR gene-editing system for the treatment of OA comprises one or more sgRNAs targeting cTNFRSF1A. In some embodiments, the CRISPR gene-editing system for the treatment of OA comprises one or more sgRNAs targeting eTNFRSF1A. In some embodiments, the CRISPR gene-editing system for the treatment of OA comprises one or more sgRNAs targeting fTNFRSF1A.

[0207] In some embodiments, the CRISPR gene-editing system for the treatment of OA comprises one or more sgRNAs targeting exon 1 of hTNFRSF1A. In some embodiments, the CRISPR gene-editing system for the treatment of OA comprises one or more sgRNAs targeting exon 2 of hTNFRSF1A. In some embodiments, the CRISPR gene-editing system for the treatment of OA comprises one or more sgRNAs targeting exon 3 of hTNFRSF1A. In some embodiments, the CRISPR gene-editing system for the treatment of OA comprises one or more sgRNAs targeting exon 4 of hTNFRSF1A. In some embodiments, the CRISPR gene-editing system for the treatment of OA comprises one or more sgRNAs targeting exon 5 of hTNFRSF1A. In some embodiments, the CRISPR gene-editing system for the treatment of OA comprises one or more sgRNAs targeting exon 6 of hTNFRSF1A. In some embodiments, the CRISPR gene-editing system for the treatment of OA comprises one or more sgRNAs targeting exon 7 of hTNFRSF1A. In some embodiments, the CRISPR gene-editing system for the treatment of OA comprises one or more sgRNAs targeting exon 8 of hTNFRSF1A. In some embodiments, the CRISPR gene-editing system for the treatment of OA comprises one or more sgRNAs targeting exon 9 of hTNFRSF1A. In some embodiments, the CRISPR gene-editing system for the treatment of OA comprises one or more sgRNAs targeting exon 10 of hTNFRSF1A. In some embodiments, the CRISPR gene-editing system for the treatment of OA comprises one or more sgRNAs targeting exon 11 of hTNFRSF1A.

[0208] In some embodiments, the CRISPR gene-editing system for the treatment of OA comprises one or more sgRNAs targeting exon 1 of cTNFRSF1A. In some embodiments, the CRISPR gene-editing system for the treatment of OA comprises one or more sgRNAs targeting exon 2 of cTNFRSF1A. In some embodiments, the CRISPR gene-editing system for the treatment of OA comprises one or more sgRNAs targeting exon 3 of cTNFRSF1A. In some embodiments, the CRISPR gene-editing system for the treatment of OA comprises one or more sgRNAs targeting exon 4 of cTNFRSF1A. In some embodiments, the CRISPR gene-editing system for the treatment of OA comprises one or more sgRNAs targeting exon 5 of cTNFRSF1A. In some embodiments, the CRISPR gene-editing system for the treatment of OA comprises one or more sgRNAs targeting exon 6 of cTNFRSF1A. In some embodiments, the CRISPR gene-editing system for the treatment of OA comprises one or more sgRNAs targeting exon 7 of cTNFRSF1A. In some embodiments, the CRISPR gene-editing system for the treatment of OA comprises one or more sgRNAs targeting exon 8 of cTNFRSF1A. In some embodiments, the CRISPR gene-editing system for the treatment of OA comprises one or more sgRNAs targeting exon 9 of cTNFRSF1A. In some embodiments, the CRISPR gene-editing system for the treatment of OA comprises one or more sgRNAs targeting exon 10 of cTNFRSF1A. In some embodiments, the CRISPR gene-editing system for the treatment of OA comprises one or more sgRNAs targeting exon 11 of cTNFRSF1A.

[0209] In some embodiments, the CRISPR gene-editing system for the treatment of OA comprises one or more sgRNAs targeting exon 1 of eTNFRSF1A. In some embodiments, the CRISPR gene-editing system for the treatment of OA comprises one or more sgRNAs targeting exon 2 of eTNFRSF1A. In some embodiments, the CRISPR gene-editing system for the treatment of OA comprises one or more sgRNAs targeting exon 3 of eTNFRSF1A. In some embodiments, the CRISPR gene-editing system for the treatment of OA comprises one or more sgRNAs targeting exon 4 of eTNFRSF1A. In some embodiments, the CRISPR gene-editing system for the treatment of OA comprises one or more sgRNAs targeting exon 5 of eTNFRSF1A. In some embodiments, the CRISPR gene-editing system for the treatment of OA comprises one or more sgRNAs targeting exon 6 of eTNFRSF1A. In some embodiments, the CRISPR gene-editing system for the treatment of OA comprises one or more sgRNAs targeting exon 7 of eTNFRSF1A. In some embodiments, the CRISPR gene-editing system for the treatment of OA comprises one or more sgRNAs targeting exon 8 of eTNFRSF1A. In some embodiments, the CRISPR gene-editing system for the treatment of OA comprises one or more sgRNAs targeting exon 9 of eTNFRSF1A. In some embodiments, the CRISPR gene-editing system for the treatment of OA comprises one or more sgRNAs targeting exon 10 of eTNFRSF1A.

[0210] In some embodiments, the CRISPR gene-editing system for the treatment of OA comprises one or more sgRNAs targeting exon 1 of fTNFRSF1A. In some embodiments, the CRISPR gene-editing system for the treatment of OA comprises one or more sgRNAs targeting exon 2 of fTNFRSF1A. In some embodiments, the CRISPR gene-editing system for the treatment of OA comprises one or more sgRNAs targeting exon 3 of fTNFRSF1A. In some embodiments, the CRISPR gene-editing system for the treatment of OA comprises one or more sgRNAs targeting exon 4 of fTNFRSF1A. In some embodiments, the CRISPR gene-editing system for the treatment of OA comprises one or more sgRNAs targeting exon 5 of fTNFRSF1A. In some embodiments, the CRISPR gene-editing system for the treatment of OA comprises one or more sgRNAs targeting exon 6 of fTNFRSF1A. In some embodiments, the CRISPR gene-editing system for the treatment of OA comprises one or more sgRNAs targeting exon 7 of fTNFRSF1A. In some embodiments, the CRISPR gene-editing system for the treatment of OA comprises one or more sgRNAs targeting exon 8 of fTNFRSF1A. In some embodiments, the CRISPR gene-editing system for the treatment of OA comprises one or more sgRNAs targeting exon 9 of fTNFRSF1A. In some embodiments, the CRISPR gene-editing system for the treatment of OA comprises one or more sgRNAs targeting exon 10 of fTNFRSF1A.

[0211] In some embodiments, the CRISPR gene-editing system for the treatment of OA comprises one or more sgRNAs targeting TNFRSF1B. In some embodiments, the CRISPR gene-editing system for the treatment of OA comprises one or more sgRNAs targeting hTNFRSF1B. In some embodiments, the CRISPR gene-editing system for the treatment of OA comprises one or more sgRNAs targeting cTNFRSF1B. In some embodiments, the CRISPR gene-editing system for the treatment of OA comprises one or more sgRNAs targeting eTNFRSF1B. In some embodiments, the CRISPR gene-editing system for the treatment of OA comprises one or more sgRNAs targeting fTNFRSF1B.

[0212] In some embodiments, the CRISPR gene-editing system for the treatment of OA comprises one or more sgRNAs targeting exon 1 of hTNFRSF1B. In some embodiments, the CRISPR gene-editing system for the treatment of OA comprises one or more sgRNAs targeting exon 2 of hTNFRSF1B. In some embodiments, the CRISPR gene-editing system for the treatment of OA comprises one or more sgRNAs targeting exon 3 of hTNFRSF1B. In some embodiments, the CRISPR gene-editing system for the treatment of OA comprises one or more sgRNAs targeting exon 4 of hTNFRSF1B. In some embodiments, the CRISPR gene-editing system for the treatment of OA comprises one or more sgRNAs targeting exon 5 of hTNFRSF1B. In some embodiments, the CRISPR gene-editing system for the treatment of OA comprises one or more sgRNAs targeting exon 6 of hTNFRSF1B. In some embodiments, the CRISPR gene-editing system for the treatment of OA comprises one or more sgRNAs targeting exon 7 of hTNFRSF1B. In some embodiments, the CRISPR gene-editing system for the treatment of OA comprises one or more sgRNAs targeting exon 8 of hTNFRSF1B. In some embodiments, the CRISPR gene-editing system for the treatment of OA comprises one or more sgRNAs targeting exon 9 of hTNFRSF1B. In some embodiments, the CRISPR gene-editing system for the treatment of OA comprises one or more sgRNAs targeting exon 10 of hTNFRSF1B. In some embodiments, the CRISPR gene-editing system for the treatment of OA comprises one or more sgRNAs targeting exon 11 of hTNFRSF1B In some embodiments, the CRISPR gene-editing system for the treatment of OA comprises one or more sgRNAs targeting exon 12 of hTNFRSF1B. In some embodiments, the CRISPR gene-editing system for the treatment of OA comprises one or more sgRNAs targeting exon 13 of hTNFRSF1B.

[0213] In some embodiments, the CRISPR gene-editing system for the treatment of OA comprises one or more sgRNAs targeting exon 1 of cTNFRSF1B. In some embodiments, the CRISPR gene-editing system for the treatment of OA comprises one or more sgRNAs targeting exon 2 of cTNFRSF1B. In some embodiments, the CRISPR gene-editing system for the treatment of OA comprises one or more sgRNAs targeting exon 3 of cTNFRSF1B. In some embodiments, the CRISPR gene-editing system for the treatment of OA comprises one or more sgRNAs targeting exon 4 of cTNFRSF1B. In some embodiments, the CRISPR gene-editing system for the treatment of OA comprises one or more sgRNAs targeting exon 5 of cTNFRSF1B. In some embodiments, the CRISPR gene-editing system for the treatment of OA comprises one or more sgRNAs targeting exon 6 of cTNFRSF1B. In some embodiments, the CRISPR gene-editing system for the treatment of OA comprises one or more sgRNAs targeting exon 7 of cTNFRSF1B. In some embodiments, the CRISPR gene-editing system for the treatment of OA comprises one or more sgRNAs targeting exon 8 of cTNFRSF1B. In some embodiments, the CRISPR gene-editing system for the treatment of OA comprises one or more sgRNAs targeting exon 9 of cTNFRSF1B. In some embodiments, the CRISPR gene-editing system for the treatment of OA comprises one or more sgRNAs targeting exon 10 of cTNFRSF1B. In some embodiments, the CRISPR gene-editing system for the treatment of OA comprises one or more sgRNAs targeting exon 11 of cTNFRSF1B.

[0214] In some embodiments, the CRISPR gene-editing system for the treatment of OA comprises one or more sgRNAs targeting exon 1 of eTNFRSF1B. In some embodiments, the CRISPR gene-editing system for the treatment of OA comprises one or more sgRNAs targeting exon 2 of eTNFRSF1B. In some embodiments, the CRISPR gene-editing system for the treatment of OA comprises one or more sgRNAs targeting exon 3 of eTNFRSF1B. In some embodiments, the CRISPR gene-editing system for the treatment of OA comprises one or more sgRNAs targeting exon 4 of eTNFRSF1B. In some embodiments, the CRISPR gene-editing system for the treatment of OA comprises one or more sgRNAs targeting exon 5 of eTNFRSF1B. In some embodiments, the CRISPR gene-editing system for the treatment of OA comprises one or more sgRNAs targeting exon 6 of eTNFRSF1B. In some embodiments, the CRISPR gene-editing system for the treatment of OA comprises one or more sgRNAs targeting exon 7 of eTNFRSF1B. In some embodiments, the CRISPR gene-editing system for the treatment of OA comprises one or more sgRNAs targeting exon 8 of eTNFRSF1B. In some embodiments, the CRISPR gene-editing system for the treatment of OA comprises one or more sgRNAs targeting exon 9 of eTNFRSF1B. In some embodiments, the CRISPR gene-editing system for the treatment of OA comprises one or more sgRNAs targeting exon 10 of eTNFRSF1B. In some embodiments, the CRISPR gene-editing system for the treatment of OA comprises one or more sgRNAs targeting exon 11 of eTNFRSF1B.

[0215] In some embodiments, the CRISPR gene-editing system for the treatment of OA comprises one or more sgRNAs targeting exon 1 of fTNFRSF1B. In some embodiments, the CRISPR gene-editing system for the treatment of OA comprises one or more sgRNAs targeting exon 2 of fTNFRSF1B. In some embodiments, the CRISPR gene-editing system for the treatment of OA comprises one or more sgRNAs targeting exon 3 of fTNFRSF1B. In some embodiments, the CRISPR gene-editing system for the treatment of OA comprises one or more sgRNAs targeting exon 4 of fTNFRSF1B. In some embodiments, the CRISPR gene-editing system for the treatment of OA comprises one or more sgRNAs targeting exon 5 of fTNFRSF1B. In some embodiments, the CRISPR gene-editing system for the treatment of OA comprises one or more sgRNAs targeting exon 6 of fTNFRSF1B. In some embodiments, the CRISPR gene-editing system for the treatment of OA comprises one or more sgRNAs targeting exon 7 of fTNFRSF1B. In some embodiments, the CRISPR gene-editing system for the treatment of OA comprises one or more sgRNAs targeting exon 8 of fTNFRSF1B. In some embodiments, the CRISPR gene-editing system for the treatment of OA comprises one or more sgRNAs targeting exon 9 of fTNFRSF1B. In some embodiments, the CRISPR gene-editing system for the treatment of OA comprises one or more sgRNAs targeting exon 10 of fTNFRSF1B.

[0216] In some embodiments, the CRISPR gene-editing system for the treatment of OA comprises one or more sgRNAs targeting TNFRSF3. In some embodiments, the CRISPR gene-editing system for the treatment of OA comprises one or more sgRNAs targeting hTNFRSF3. In some embodiments, the CRISPR gene-editing system for the treatment of OA comprises one or more sgRNAs targeting cTNFRSF3. In some embodiments, the CRISPR gene-editing system for the treatment of OA comprises one or more sgRNAs targeting eTNFRSF3. In some embodiments, the CRISPR gene-editing system for the treatment of OA comprises one or more sgRNAs targeting fTNFRSF3.

[0217] In some embodiments, the CRISPR gene-editing system for the treatment of OA comprises one or more sgRNAs targeting exon 1 of hTNFRSF3. In some embodiments, the CRISPR gene-editing system for the treatment of OA comprises one or more sgRNAs targeting exon 2 of hTNFRSF3. In some embodiments, the CRISPR gene-editing system for the treatment of OA comprises one or more sgRNAs targeting exon 3 of hTNFRSF3. In some embodiments, the CRISPR gene-editing system for the treatment of OA comprises one or more sgRNAs targeting exon 4 of hTNFRSF3. In some embodiments, the CRISPR gene-editing system for the treatment of OA comprises one or more sgRNAs targeting exon 5 of hTNFRSF3. In some embodiments, the CRISPR gene-editing system for the treatment of OA comprises one or more sgRNAs targeting exon 6 of hTNFRSF3. In some embodiments, the CRISPR gene-editing system for the treatment of OA comprises one or more sgRNAs targeting exon 7 of hTNFRSF3. In some embodiments, the CRISPR gene-editing system for the treatment of OA comprises one or more sgRNAs targeting exon 8 of hTNFRSF3. In some embodiments, the CRISPR gene-editing system for the treatment of OA comprises one or more sgRNAs targeting exon 9 of hTNFRSF3. In some embodiments, the CRISPR gene-editing system for the treatment of OA comprises one or more sgRNAs targeting exon 10 of hTNFRSF3. In some embodiments, the CRISPR gene-editing system for the treatment of OA comprises one or more sgRNAs targeting exon 11 of hTNFRSF3. In some embodiments, the CRISPR gene-editing system for the treatment of OA comprises one or more sgRNAs targeting exon 12 of hTNFRSF3.

[0218] In some embodiments, the CRISPR gene-editing system for the treatment of OA comprises one or more sgRNAs targeting exon 1 of cTNFRSF3. In some embodiments, the CRISPR gene-editing system for the treatment of OA comprises one or more sgRNAs targeting exon 2 of cTNFRSF3. In some embodiments, the CRISPR gene-editing system for the treatment of OA comprises one or more sgRNAs targeting exon 3 of cTNFRSF3. In some embodiments, the CRISPR gene-editing system for the treatment of OA comprises one or more sgRNAs targeting exon 4 of cTNFRSF3. In some embodiments, the CRISPR gene-editing system for the treatment of OA comprises one or more sgRNAs targeting exon 5 of cTNFRSF3. In some embodiments, the CRISPR gene-editing system for the treatment of OA comprises one or more sgRNAs targeting exon 6 of cTNFRSF3. In some embodiments, the CRISPR gene-editing system for the treatment of OA comprises one or more sgRNAs targeting exon 7 of cTNFRSF3. In some embodiments, the CRISPR gene-editing system for the treatment of OA comprises one or more sgRNAs targeting exon 8 of cTNFRSF3. In some embodiments, the CRISPR gene-editing system for the treatment of OA comprises one or more sgRNAs targeting exon 9 of cTNFRSF3. In some embodiments, the CRISPR gene-editing system for the treatment of OA comprises one or more sgRNAs targeting exon 10 of cTNFRSF3.

[0219] In some embodiments, the CRISPR gene-editing system for the treatment of OA comprises one or more sgRNAs targeting exon 1 of eTNFRSF3. In some embodiments, the CRISPR gene-editing system for the treatment of OA comprises one or more sgRNAs targeting exon 2 of eTNFRSF3. In some embodiments, the CRISPR gene-editing system for the treatment of OA comprises one or more sgRNAs targeting exon 3 of eTNFRSF3. In some embodiments, the CRISPR gene-editing system for the treatment of OA comprises one or more sgRNAs targeting exon 4 of eTNFRSF3. In some embodiments, the CRISPR gene-editing system for the treatment of OA comprises one or more sgRNAs targeting exon 5 of eTNFRSF3. In some embodiments, the CRISPR gene-editing system for the treatment of OA comprises one or more sgRNAs targeting exon 6 of eTNFRSF3. In some embodiments, the CRISPR gene-editing system for the treatment of OA comprises one or more sgRNAs targeting exon 7 of eTNFRSF3. In some embodiments, the CRISPR gene-editing system for the treatment of OA comprises one or more sgRNAs targeting exon 8 of eTNFRSF3. In some embodiments, the CRISPR gene-editing system for the treatment of OA comprises one or more sgRNAs targeting exon 9 of eTNFRSF3. In some embodiments, the CRISPR gene-editing system for the treatment of OA comprises one or more sgRNAs targeting exon 10 of eTNFRSF3.

[0220] In some embodiments, the CRISPR gene-editing system for the treatment of OA comprises one or more sgRNAs targeting exon 1 of fTNFRSF3. In some embodiments, the CRISPR gene-editing system for the treatment of OA comprises one or more sgRNAs targeting exon 2 of fTNFRSF3. In some embodiments, the CRISPR gene-editing system for the treatment of OA comprises one or more sgRNAs targeting exon 3 of fTNFRSF3. In some embodiments, the CRISPR gene-editing system for the treatment of OA comprises one or more sgRNAs targeting exon 4 of fTNFRSF3. In some embodiments, the CRISPR gene-editing system for the treatment of OA comprises one or more sgRNAs targeting exon 5 of fTNFRSF3. In some embodiments, the CRISPR gene-editing system for the treatment of OA comprises one or more sgRNAs targeting exon 6 of fTNFRSF3. In some embodiments, the CRISPR gene-editing system for the treatment of OA comprises one or more sgRNAs targeting exon 7 of fTNFRSF3. In some embodiments, the CRISPR gene-editing system for the treatment of OA comprises one or more sgRNAs targeting exon 8 of fTNFRSF3. In some embodiments, the CRISPR gene-editing system for the treatment of OA comprises one or more sgRNAs targeting exon 9 of fTNFRSF3. In some embodiments, the CRISPR gene-editing system for the treatment of OA comprises one or more sgRNAs targeting exon 10 of fTNFRSF3.

[0221] In some embodiments, the CRISPR gene-editing system for the treatment of OA comprises one or more sgRNAs targeting TNFRSF4. In some embodiments, the CRISPR gene-editing system for the treatment of OA comprises one or more sgRNAs targeting hTNFRSF4. In some embodiments, the CRISPR gene-editing system for the treatment of OA comprises one or more sgRNAs targeting cTNFRSF4. In some embodiments, the CRISPR gene-editing system for the treatment of OA comprises one or more sgRNAs targeting eTNFRSF4. In some embodiments, the CRISPR gene-editing system for the treatment of OA comprises one or more sgRNAs targeting fTNFRSF4.

[0222] In some embodiments, the CRISPR gene-editing system for the treatment of OA comprises one or more sgRNAs targeting exon 1 of hTNFRSF4. In some embodiments, the CRISPR gene-editing system for the treatment of OA comprises one or more sgRNAs targeting exon 2 of hTNFRSF4. In some embodiments, the CRISPR gene-editing system for the treatment of OA comprises one or more sgRNAs targeting exon 3 of hTNFRSF4. In some embodiments, the CRISPR gene-editing system for the treatment of OA comprises one or more sgRNAs targeting exon 4 of hTNFRSF4. In some embodiments, the CRISPR gene-editing system for the treatment of OA comprises one or more sgRNAs targeting exon 5 of hTNFRSF4. In some embodiments, the CRISPR gene-editing system for the treatment of OA comprises one or more sgRNAs targeting exon 6 of hTNFRSF4.

[0223] In some embodiments, the CRISPR gene-editing system for the treatment of OA comprises one or more sgRNAs targeting exon 1 of cTNFRSF4. In some embodiments, the CRISPR gene-editing system for the treatment of OA comprises one or more sgRNAs targeting exon 2 of cTNFRSF4. In some embodiments, the CRISPR gene-editing system for the treatment of OA comprises one or more sgRNAs targeting exon 3 of cTNFRSF4. In some embodiments, the CRISPR gene-editing system for the treatment of OA comprises one or more sgRNAs targeting exon 4 of cTNFRSF4. In some embodiments, the CRISPR gene-editing system for the treatment of OA comprises one or more sgRNAs targeting exon 5 of cTNFRSF4. In some embodiments, the CRISPR gene-editing system for the treatment of OA comprises one or more sgRNAs targeting exon 6 of cTNFRSF4. In some embodiments, the CRISPR gene-editing system for the treatment of OA comprises one or more sgRNAs targeting exon 7 of cTNFRSF4.

[0224] In some embodiments, the CRISPR gene-editing system for the treatment of OA comprises one or more sgRNAs targeting exon 1 of eTNFRSF4. In some embodiments, the CRISPR gene-editing system for the treatment of OA comprises one or more sgRNAs targeting exon 2 of eTNFRSF4. In some embodiments, the CRISPR gene-editing system for the treatment of OA comprises one or more sgRNAs targeting exon 3 of eTNFRSF4. In some embodiments, the CRISPR gene-editing system for the treatment of OA comprises one or more sgRNAs targeting exon 4 of eTNFRSF4. In some embodiments, the CRISPR gene-editing system for the treatment of OA comprises one or more sgRNAs targeting exon 5 of eTNFRSF4. In some embodiments, the CRISPR gene-editing system for the treatment of OA comprises one or more sgRNAs targeting exon 6 of eTNFRSF4. In some embodiments, the CRISPR gene-editing system for the treatment of OA comprises one or more sgRNAs targeting exon 7 of eTNFRSF4.

[0225] In some embodiments, the CRISPR gene-editing system for the treatment of OA comprises one or more sgRNAs targeting exon 1 of fTNFRSF4. In some embodiments, the CRISPR gene-editing system for the treatment of OA comprises one or more sgRNAs targeting exon 2 of fTNFRSF4. In some embodiments, the CRISPR gene-editing system for the treatment of OA comprises one or more sgRNAs targeting exon 3 of fTNFRSF4. In some embodiments, the CRISPR gene-editing system for the treatment of OA comprises one or more sgRNAs targeting exon 4 of fTNFRSF4. In some embodiments, the CRISPR gene-editing system for the treatment of OA comprises one or more sgRNAs targeting exon 5 of fTNFRSF4. In some embodiments, the CRISPR gene-editing system for the treatment of OA comprises one or more sgRNAs targeting exon 6 of fTNFRSF4. In some embodiments, the CRISPR gene-editing system for the treatment of OA comprises one or more sgRNAs targeting exon 7 of fTNFRSF4.

[0226] In some embodiments, the CRISPR gene-editing system for the treatment of OA comprises one or more sgRNAs targeting TNFRSF11A. In some embodiments, the CRISPR gene-editing system for the treatment of OA comprises one or more sgRNAs targeting hTNFRSF11A. In some embodiments, the CRISPR gene-editing system for the treatment of OA comprises one or more sgRNAs targeting cTNFRSF11A. In some embodiments, the CRISPR gene-editing system for the treatment of OA comprises one or more sgRNAs targeting eTNFRSF11A. In some embodiments, the CRISPR gene-editing system for the treatment of OA comprises one or more sgRNAs targeting fTNFRSF11A.

[0227] In some embodiments, the CRISPR gene-editing system for the treatment of OA comprises one or more sgRNAs targeting exon 1 of hTNFRSF11A. In some embodiments, the CRISPR gene-editing system for the treatment of OA comprises one or more sgRNAs targeting exon 2 of hTNFRSF11A. In some embodiments, the CRISPR gene-editing system for the treatment of OA comprises one or more sgRNAs targeting exon 3 of hTNFRSF11A. In some embodiments, the CRISPR gene-editing system for the treatment of OA comprises one or more sgRNAs targeting exon 4 of hTNFRSF11A. In some embodiments, the CRISPR gene-editing system for the treatment of OA comprises one or more sgRNAs targeting exon 5 of hTNFRSF11A. In some embodiments, the CRISPR gene-editing system for the treatment of OA comprises one or more sgRNAs targeting exon 6 of hTNFRSF11A. In some embodiments, the CRISPR gene-editing system for the treatment of OA comprises one or more sgRNAs targeting exon 7 of hTNFRSF11A. In some embodiments, the CRISPR gene-editing system for the treatment of OA comprises one or more sgRNAs targeting exon 8 of hTNFRSF11A. In some embodiments, the CRISPR gene-editing system for the treatment of OA comprises one or more sgRNAs targeting exon 9 of hTNFRSF11A. In some embodiments, the CRISPR gene-editing system for the treatment of OA comprises one or more sgRNAs targeting exon 10 of hTNFRSF11A. In some embodiments, the CRISPR gene-editing system for the treatment of OA comprises one or more sgRNAs targeting exon 11 of hTNFRSF11A. In some embodiments, the CRISPR gene-editing system for the treatment of OA comprises one or more sgRNAs targeting exon 12 of hTNFRSF11A.

[0228] In some embodiments, the CRISPR gene-editing system for the treatment of OA comprises one or more sgRNAs targeting exon 1 of cTNFRSF11A. In some embodiments, the CRISPR gene-editing system for the treatment of OA comprises one or more sgRNAs targeting exon 2 of cTNFRSF11A. In some embodiments, the CRISPR gene-editing system for the treatment of OA comprises one or more sgRNAs targeting exon 3 of cTNFRSF11A. In some embodiments, the CRISPR gene-editing system for the treatment of OA comprises one or more sgRNAs targeting exon 4 of cTNFRSF11A. In some embodiments, the CRISPR gene-editing system for the treatment of OA comprises one or more sgRNAs targeting exon 5 of cTNFRSF11A. In some embodiments, the CRISPR gene-editing system for the treatment of OA comprises one or more sgRNAs targeting exon 6 of cTNFRSF11A. In some embodiments, the CRISPR gene-editing system for the treatment of OA comprises one or more sgRNAs targeting exon 7 of cTNFRSF11A. In some embodiments, the CRISPR gene-editing system for the treatment of OA comprises one or more sgRNAs targeting exon 8 of cTNFRSF11A. In some embodiments, the CRISPR gene-editing system for the treatment of OA comprises one or more sgRNAs targeting exon 9 of cTNFRSF11A. In some embodiments, the CRISPR gene-editing system for the treatment of OA comprises one or more sgRNAs targeting exon 10 of cTNFRSF11A. In some embodiments, the CRISPR gene-editing system for the treatment of OA comprises one or more sgRNAs targeting exon 11 of cTNFRSF11A.

[0229] In some embodiments, the CRISPR gene-editing system for the treatment of OA comprises one or more sgRNAs targeting exon 1 of eTNFRSF11A. In some embodiments, the CRISPR gene-editing system for the treatment of OA comprises one or more sgRNAs targeting exon 2 of eTNFRSF11A. In some embodiments, the CRISPR gene-editing system for the treatment of OA comprises one or more sgRNAs targeting exon 3 of eTNFRSF11A. In some embodiments, the CRISPR gene-editing system for the treatment of OA comprises one or more sgRNAs targeting exon 4 of eTNFRSF11A. In some embodiments, the CRISPR gene-editing system for the treatment of OA comprises one or more sgRNAs targeting exon 5 of eTNFRSF11A. In some embodiments, the CRISPR gene-editing system for the treatment of OA comprises one or more sgRNAs targeting exon 6 of eTNFRSF11A. In some embodiments, the CRISPR gene-editing system for the treatment of OA comprises one or more sgRNAs targeting exon 7 of eTNFRSF11A. In some embodiments, the CRISPR gene-editing system for the treatment of OA comprises one or more sgRNAs targeting exon 8 of eTNFRSF11A. In some embodiments, the CRISPR gene-editing system for the treatment of OA comprises one or more sgRNAs targeting exon 9 of eTNFRSF11A. In some embodiments, the CRISPR gene-editing system for the treatment of OA comprises one or more sgRNAs targeting exon 10 of eTNFRSF11A.

[0230] In some embodiments, the CRISPR gene-editing system for the treatment of OA comprises one or more sgRNAs targeting exon 1 of fTNFRSF11A. In some embodiments, the CRISPR gene-editing system for the treatment of OA comprises one or more sgRNAs targeting exon 2 of fTNFRSF11A. In some embodiments, the CRISPR gene-editing system for the treatment of OA comprises one or more sgRNAs targeting exon 3 of fTNFRSF11A. In some embodiments, the CRISPR gene-editing system for the treatment of OA comprises one or more sgRNAs targeting exon 4 of fTNFRSF11A. In some embodiments, the CRISPR gene-editing system for the treatment of OA comprises one or more sgRNAs targeting exon 5 of fTNFRSF11A. In some embodiments, the CRISPR gene-editing system for the treatment of OA comprises one or more sgRNAs targeting exon 6 of fTNFRSF11A. In some embodiments, the CRISPR gene-editing system for the treatment of OA comprises one or more sgRNAs targeting exon 7 of fTNFRSF11A. In some embodiments, the CRISPR gene-editing system for the treatment of OA comprises one or more sgRNAs targeting exon 8 of fTNFRSF11A. In some embodiments, the CRISPR gene-editing system for the treatment of OA comprises one or more sgRNAs targeting exon 9 of fTNFRSF11A. In some embodiments, the CRISPR gene-editing system for the treatment of OA comprises one or more sgRNAs targeting exon 10 of fTNFRSF11A. In some embodiments, the CRISPR gene-editing system for the treatment of OA comprises one or more sgRNAs targeting exon 11 of fTNFRSF11A.

### C. Psoriatic Arthritis

[0231] In one aspect, the present disclosure encompasses treatments for psoriatic arthritis (PsA). In some embodiments, the psoriatic arthritis treatment comprises a therapeutically effective amount of a Clustered Regularly Interspaced Short Palindromic Repeats (CRISPR) gene-editing system, the system comprising: (i) a CRISPR Associated (Cas) protein; and (ii) at least one guide RNA targeting IL1R1. In some embodiments, the psoriatic arthritis treatment comprises a CRISPR gene-editing system targeting hIL1R1. In some embodiments, the psoriatic arthritis treatment comprises a CRISPR gene-editing system targeting cIL1R1. In some embodiments, the psoriatic arthritis treatment comprises a CRISP gene-editing system R targeting eIL1R1. In some embodiments, the psoriatic arthritis treatment comprises a CRISPR gene-editing system targeting fIL1R1.

[0232] In some embodiments, the CRISPR gene-editing system for the treatment of psoriatic arthritis comprises one or more sgRNAs targeting exon 1 of hIL1R1. In some embodiments, the CRISPR gene-editing system for the treatment of psoriatic arthritis comprises one or more sgRNAs targeting exon 2 of hIL1R1. In some embodiments, the CRISPR gene-editing system for the treatment of psoriatic arthritis comprises one or more sgRNAs targeting exon 3 of hIL1R1. In some embodiments, the CRISPR gene-editing system for the treatment of psoriatic arthritis comprises one or more sgRNAs targeting exon 4 of hIL1R1. In some embodiments, the CRISPR gene-editing system for the treatment of psoriatic arthritis comprises one or more sgRNAs targeting exon 5 of hIL1R1. In some embodiments, the CRISPR gene-editing system for the treatment of psoriatic arthritis comprises one or more sgRNAs targeting exon 6 of hIL1R1. In some embodiments, the CRISPR gene-editing system for the treatment of psoriatic arthritis comprises one or more sgRNAs targeting exon 7 of hIL1R1. In some embodiments, the CRISPR gene-editing system for the treatment of psoriatic arthritis comprises one or more sgRNAs targeting exon 8 of hIL1R1. In some embodiments, the CRISPR gene-editing system for the treatment of psoriatic arthritis comprises one or more sgRNAs targeting exon 9 of hIL1R1. In some embodiments, the CRISPR gene-editing system for the treatment of psoriatic arthritis comprises one or more sgRNAs targeting exon 10 of hIL1R1. In some embodiments, the CRISPR gene-editing system for the treatment of psoriatic arthritis comprises one or more sgRNAs targeting exon 11 of hIL1R1. In some embodiments, the CRISPR gene-editing system for the treatment of psoriatic arthritis comprises one or more sgRNAs targeting exon 12 of hIL1R1. In some embodiments, the CRISPR gene-editing system for the treatment of psoriatic arthritis comprises one or more sgRNAs targeting exon 13 of hIL1R1. In some embodiments, the CRISPR gene-editing system for the treatment of psoriatic arthritis comprises one or more sgRNAs targeting exon 14 of hIL1R1. In some embodiments, the CRISPR gene-editing system for the treatment of psoriatic arthritis comprises one or more sgRNAs targeting exon 15 of hIL1R1. In some embodiments, the CRISPR gene-editing system for the treatment of psoriatic arthritis comprises one or more sgRNAs targeting exon 16 of hIL1R1. In some embodiments, the CRISPR gene-editing system for the treatment of psoriatic arthritis comprises one or more sgRNAs targeting exon 17 of hIL1R1. In some embodiments, the CRISPR gene-editing system for the treatment of psoriatic arthritis comprises one or more sgRNAs targeting exon 18 of hIL1R1. In some embodiments, the CRISPR gene-editing system for the treatment of psoriatic arthritis comprises one or more sgRNAs targeting exon 19 of hIL1R1. In some embodiments, the CRISPR gene-editing system for the treatment of psoriatic arthritis comprises one or more sgRNAs targeting exon 20 of hIL1R1. In some embodiments, the CRISPR gene-editing system for the treatment of psoriatic arthritis comprises one or more sgRNAs targeting exon 21 of hIL1R1.

[0233] In some embodiments, the CRISPR gene-editing system for the treatment of psoriatic arthritis comprises one or more sgRNAs targeting exon 1 of cIL1R1. In some embodiments, the CRISPR gene-editing system for the treatment of psoriatic arthritis comprises one or more sgRNAs targeting exon 2 of cIL1R1. In some embodiments, the CRISPR gene-editing system for the treatment of psoriatic arthritis comprises one or more sgRNAs targeting exon 3 of cIL1R1. In some embodiments, the CRISPR gene-editing system for the treatment of psoriatic arthritis comprises one or more sgRNAs targeting exon 4 of cIL1R1. In some embodiments, the CRISPR gene-editing system for the treatment of psoriatic arthritis comprises one or more sgRNAs targeting exon 5 of cIL1R1. In some embodiments, the CRISPR gene-editing system for the treatment of psoriatic arthritis comprises one or more sgRNAs targeting exon 6 of cIL1R1. In some embodiments, the CRISPR gene-editing system for the treatment of psoriatic arthritis comprises one or more sgRNAs targeting exon 7 of cIL1R1. In some embodiments, the CRISPR gene-editing system for the treatment of psoriatic arthritis comprises one or more sgRNAs targeting exon 8 of cIL1R1. In some embodiments, the CRISPR gene-editing system for the treatment of psoriatic arthritis comprises one or more sgRNAs targeting exon 9 of cIL1R1. In some embodiments, the CRISPR gene-editing system for the treatment of psoriatic arthritis comprises one or more sgRNAs targeting exon 10 of cIL1R1. In some embodiments, the CRISPR gene-editing system for the treatment of psoriatic arthritis comprises one or more sgRNAs targeting exon 11 of cIL1R1. In some embodiments, the CRISPR gene-editing system for the treatment of psoriatic arthritis comprises one or more sgRNAs targeting exon 12 of cIL1R1. In some embodiments, the CRISPR gene-editing system for the treatment of psoriatic arthritis comprises one or more sgRNAs targeting exon 13 of cIL1R1. In some embodiments, the CRISPR gene-editing system for the treatment of psoriatic arthritis comprises one or more sgRNAs targeting exon 14 of cIL1R1. In some embodiments, the CRISPR gene-editing system for the treatment of psoriatic arthritis comprises one or more sgRNAs targeting exon 15 of cIL1R1. In some embodiments, the CRISPR gene-editing system for the treatment of psoriatic arthritis comprises one or more sgRNAs targeting exon 16 of cIL1R1.

[0234] In some embodiments, the CRISPR gene-editing system for the treatment of psoriatic arthritis comprises one or more sgRNAs targeting exon 1 of eIL1R1. In some embodiments, the CRISPR gene-editing system for the treatment of psoriatic arthritis comprises one or more sgRNAs targeting exon 2 of eIL1R1. In some embodiments, the CRISPR gene-editing system for the treatment of psoriatic arthritis comprises one or more sgRNAs targeting exon 3 of eIL1R1. In some embodiments, the CRISPR gene-editing system for the treatment of psoriatic arthritis comprises one or more sgRNAs targeting exon 4 of eIL1R1. In some embodiments, the CRISPR gene-editing system for the treatment of psoriatic arthritis comprises one or more sgRNAs targeting exon 5 of eIL1R1. In some embodiments, the CRISPR gene-editing system for the treatment of psoriatic arthritis comprises one or more sgRNAs targeting exon 6 of eIL1R1. In some embodiments, the CRISPR gene-editing system for the treatment of psoriatic arthritis comprises one or more sgRNAs targeting exon 7 of eIL1R1. In some embodiments, the CRISPR gene-editing system for the treatment of psoriatic arthritis comprises one or more sgRNAs targeting exon 8 of eIL1R1. In some embodiments, the CRISPR gene-editing system for the treatment of psoriatic arthritis comprises one or more sgRNAs targeting exon 9 of eIL1R1. In some embodiments, the CRISPR gene-editing system for the treatment of psoriatic arthritis comprises one or more sgRNAs targeting exon 10 of eIL1R1. In some embodiments, the CRISPR gene-editing system for the treatment of psoriatic arthritis comprises one or more sgRNAs targeting exon 11 of eIL1R1. In some embodiments, the CRISPR gene-editing system for the treatment of psoriatic arthritis comprises one or more sgRNAs targeting exon 12 of eIL1R1. In some embodiments, the CRISPR gene-editing system for the treatment of psoriatic arthritis comprises one or more sgRNAs targeting exon 13 of eIL1R1. In some embodiments, the CRISPR gene-editing system for the treatment of psoriatic arthritis comprises one or more sgRNAs targeting exon 14 of eIL1R1. In some embodiments, the CRISPR gene-editing system for the treatment of psoriatic arthritis comprises one or more sgRNAs targeting exon 15 of eIL1R1.

[0235] In some embodiments, the CRISPR gene-editing system for the treatment of psoriatic arthritis comprises one or more sgRNAs targeting exon 1 of fIL1R1. In some embodiments, the CRISPR gene-editing system for the treatment of psoriatic arthritis comprises one or more sgRNAs targeting exon 2 of fIL1R1. In some embodiments, the CRISPR gene-editing system for the treatment of psoriatic arthritis comprises one or more sgRNAs targeting exon 3 of fIL1R1. In some embodiments, the CRISPR gene-editing system for the treatment of psoriatic arthritis comprises one or more sgRNAs targeting exon 4 of fIL1R1. In some embodiments, the CRISPR gene-editing system for the treatment of psoriatic arthritis comprises one or more sgRNAs targeting exon 5 of fIL1R1. In some embodiments, the CRISPR gene-editing system for the treatment of psoriatic arthritis comprises one or more sgRNAs targeting exon 6 of fIL1R1. In some embodiments, the CRISPR gene-editing system for the treatment of psoriatic arthritis comprises one or more sgRNAs targeting exon 7 of fIL1R1. In some embodiments, the CRISPR gene-editing system for the treatment of psoriatic arthritis comprises one or more sgRNAs targeting exon 8 of fIL1R1. In some embodiments, the CRISPR gene-editing system for the treatment of psoriatic arthritis comprises one or more sgRNAs targeting exon 9 of fIL1R1. In some embodiments, the CRISPR gene-editing system for the treatment of psoriatic arthritis comprises one or more sgRNAs targeting exon 10 of fIL1R1. In some embodiments, the CRISPR gene-editing system for the treatment of psoriatic arthritis comprises one or more sgRNAs targeting exon 11 of fIL1R1. In some embodiments, the CRISPR gene-editing system for the treatment of psoriatic arthritis comprises one or more sgRNAs targeting exon 12 of fIL1R1. In some embodiments, the CRISPR gene-editing system for the treatment of psoriatic arthritis comprises one or more sgRNAs targeting exon 13 of fIL1R1. In some embodiments, the CRISPR gene-editing system for the treatment of psoriatic arthritis comprises one or more sgRNAs targeting exon 14 of fIL1R1. In some embodiments, the CRISPR gene-editing system for the treatment of psoriatic arthritis comprises one or more sgRNAs targeting exon 15 of fIL1R1. In some embodiments, the CRISPR gene-editing system for the treatment of psoriatic arthritis comprises one or more sgRNAs targeting exon 16 of fIL1R1. In some embodiments, the CRISPR gene-editing system for the treatment of psoriatic arthritis comprises one or more sgRNAs targeting exon 17 of fIL1R1. In some embodiments, the CRISPR gene-editing system for the treatment of psoriatic arthritis comprises one or more sgRNAs targeting exon 18 of fIL1R1.

[0236] In some embodiments, the CRISPR gene-editing system for the treatment of psoriatic arthritis comprises one or more sgRNAs targeting IL1RAP. In some embodiments, the CRISPR gene-editing system for the treatment of psoriatic arthritis comprises one or more sgRNAs targeting hIL1RAP. In some embodiments, the CRISPR gene-editing system for the treatment of psoriatic arthritis comprises one or more sgRNAs targeting cIL1RAP. In some embodiments, the CRISPR gene-editing system for the treatment of psoriatic arthritis comprises one or more sgRNAs targeting eIL1RAP. In some embodiments, the CRISPR gene-editing system for the treatment of psoriatic arthritis comprises one or more sgRNAs targeting fIL1RAP.

[0237] In some embodiments, the CRISPR gene-editing system for the treatment of psoriatic arthritis comprises one or more sgRNAs targeting exon 1 of hIL1RAP. In some embodiments, the CRISPR gene-editing system for the treatment of psoriatic arthritis comprises one or more sgRNAs targeting exon 2 of hIL1RAP. In some embodiments, the CRISPR gene-editing system for the treatment of psoriatic arthritis comprises one or more sgRNAs targeting exon 3 of hIL1RAP. In some embodiments, the CRISPR gene-editing system for the treatment of psoriatic arthritis comprises one or more sgRNAs targeting exon 4 of hIL1RAP. In some embodiments, the CRISPR gene-editing system for the treatment of psoriatic arthritis comprises one or more sgRNAs targeting exon 5 of hIL1RAP. In some embodiments, the CRISPR gene-editing system for the treatment of psoriatic arthritis comprises one or more sgRNAs targeting exon 6 of hIL1RAP. In some embodiments, the CRISPR gene-editing system for the treatment of psoriatic arthritis comprises one or more sgRNAs targeting exon 7 of hIL1RAP. In some embodiments, the CRISPR gene-editing system for the treatment of psoriatic arthritis comprises one or more sgRNAs targeting exon 8 of hIL1RAP. In some embodiments, the CRISPR gene-editing system for the treatment of psoriatic arthritis comprises one or more sgRNAs targeting exon 9 of hIL1RAP. In some embodiments, the CRISPR gene-editing system for the treatment of psoriatic arthritis comprises one or more sgRNAs targeting exon 10 of hIL1RAP. In some embodiments, the CRISPR gene-editing system for the treatment of psoriatic arthritis comprises one or more sgRNAs targeting exon 11 of hIL1RAP. In some embodiments, the CRISPR gene-editing system for the treatment of psoriatic arthritis comprises one or more sgRNAs targeting exon 12 of hIL1RAP. In some embodiments, the CRISPR gene-editing system for the treatment of psoriatic arthritis comprises one or more sgRNAs targeting exon 13 of hIL1RAP. In some embodiments, the CRISPR gene-editing system for the treatment of psoriatic arthritis comprises one or more sgRNAs targeting exon 14 of hIL1RAP. In some embodiments, the CRISPR gene-editing system for the treatment of psoriatic arthritis comprises one or more sgRNAs targeting exon 15 of hIL1RAP. In some embodiments, the CRISPR gene-editing system for the treatment of psoriatic arthritis comprises one or more sgRNAs targeting exon 16 of hIL1RAP. In some embodiments, the CRISPR gene-editing system for the treatment of psoriatic arthritis comprises one or more sgRNAs targeting exon 17 of hIL1RAP.

[0238] In some embodiments, the CRISPR gene-editing system for the treatment of psoriatic arthritis comprises one or more sgRNAs targeting exon 1 of cIL1RAP. In some embodiments, the CRISPR gene-editing system for the treatment of psoriatic arthritis comprises one or more sgRNAs targeting exon 2 of cIL1RAP. In some embodiments, the CRISPR gene-editing system for the treatment of psoriatic arthritis comprises one or more sgRNAs targeting exon 3 of cIL1RAP. In some embodiments, the CRISPR gene-editing system for the treatment of psoriatic arthritis comprises one or more sgRNAs targeting exon 4 of cIL1RAP. In some embodiments, the CRISPR gene-editing system for the treatment of psoriatic arthritis comprises one or more sgRNAs targeting exon 5 of cIL1RAP. In some embodiments, the CRISPR gene-editing system for the treatment of psoriatic arthritis comprises one or more sgRNAs targeting exon 6 of cIL1RAP. In some embodiments, the CRISPR gene-editing system for the treatment of psoriatic arthritis comprises one or more sgRNAs targeting exon 7 of cIL1RAP. In some embodiments, the CRISPR gene-editing system for the treatment of psoriatic arthritis comprises one or more sgRNAs targeting exon 8 of cIL1RAP. In some embodiments, the CRISPR gene-editing system for the treatment of psoriatic arthritis comprises one or more sgRNAs targeting exon 9 of cIL1RAP. In some embodiments, the CRISPR gene-editing system for the treatment of psoriatic arthritis comprises one or more sgRNAs targeting exon 10 of cIL1RAP. In some embodiments, the CRISPR gene-editing system for the treatment of psoriatic arthritis comprises one or more sgRNAs targeting exon 11 of cIL1RAP. In some embodiments, the CRISPR gene-editing system for the treatment of psoriatic arthritis comprises one or more sgRNAs targeting exon 12 of cIL1RAP. In some embodiments, the CRISPR gene-editing system for the treatment of psoriatic arthritis comprises one or more sgRNAs targeting exon 13 of cIL1RAP. In some embodiments, the CRISPR gene-editing system for the treatment of psoriatic arthritis comprises one or more sgRNAs targeting exon 14 of cIL1RAP. In some embodiments, the CRISPR gene-editing system for the treatment of psoriatic arthritis comprises one or more sgRNAs targeting exon 15 of cIL1RAP. In some embodiments, the CRISPR gene-editing system for the treatment of psoriatic arthritis comprises one or more sgRNAs targeting exon 16 of cIL1RAP.

[0239] In some embodiments, the CRISPR gene-editing system for the treatment of psoriatic arthritis comprises one or more sgRNAs targeting exon 1 of eIL1RAP. In some embodiments, the CRISPR gene-editing system for the treatment of psoriatic arthritis comprises one or more sgRNAs targeting exon 2 of eIL1RAP. In some embodiments, the CRISPR gene-editing system for the treatment of psoriatic arthritis comprises one or more sgRNAs targeting exon 3 of eIL1RAP. In some embodiments, the CRISPR gene-editing system for the treatment of psoriatic arthritis comprises one or more sgRNAs targeting exon 4 of eIL1RAP. In some embodiments, the CRISPR gene-editing system for the treatment of psoriatic arthritis comprises one or more sgRNAs targeting exon 5 of eIL1RAP. In some embodiments, the CRISPR gene-editing system for the treatment of psoriatic arthritis comprises one or more sgRNAs targeting exon 6 of eIL1RAP. In some embodiments, the CRISPR gene-editing system for the treatment of psoriatic arthritis comprises one or more sgRNAs targeting exon 7 of eIL1RAP. In some embodiments, the CRISPR gene-editing system for the treatment of psoriatic arthritis comprises one or more sgRNAs targeting exon 8 of eIL1RAP. In some embodiments, the CRISPR gene-editing system for the treatment of psoriatic arthritis comprises one or more sgRNAs targeting exon 9 of eIL1RAP. In some embodiments, the CRISPR gene-editing system for the treatment of psoriatic arthritis comprises one or more sgRNAs targeting exon 10 of eIL1RAP. In some embodiments, the CRISPR gene-editing system for the treatment of psoriatic arthritis comprises one or more sgRNAs targeting exon 11 of eIL1RAP. In some embodiments, the CRISPR gene-editing system for the treatment of psoriatic arthritis comprises one or more sgRNAs targeting exon 12 of eIL1RAP. In some embodiments, the CRISPR gene-editing system for the treatment of psoriatic arthritis comprises one or more sgRNAs targeting exon 13 of eIL1RAP.

[0240] In some embodiments, the CRISPR gene-editing system for the treatment of psoriatic arthritis comprises one or more sgRNAs targeting exon 1 of fIL1RAP. In some embodiments, the CRISPR gene-editing system for the treatment of psoriatic arthritis comprises one or more sgRNAs targeting exon 2 of fIL1RAP. In some embodiments, the CRISPR gene-editing system for the treatment of psoriatic arthritis comprises one or more sgRNAs targeting exon 3 of fIL1RAP. In some embodiments, the CRISPR gene-editing system for the treatment of psoriatic arthritis comprises one or more sgRNAs targeting exon 4 of fIL1RAP. In some embodiments, the CRISPR gene-editing system for the treatment of psoriatic arthritis comprises one or more sgRNAs targeting exon 5 of fIL1RAP. In some embodiments, the CRISPR gene-editing system for the treatment of psoriatic arthritis comprises one or more sgRNAs targeting exon 6 of fIL1RAP. In some embodiments, the CRISPR gene-editing system for the treatment of psoriatic arthritis comprises one or more sgRNAs targeting exon 7 of fIL1RAP. In some embodiments, the CRISPR gene-editing system for the treatment of psoriatic arthritis comprises one or more sgRNAs targeting exon 8 of fIL1RAP. In some embodiments, the CRISPR gene-editing system for the treatment of psoriatic arthritis comprises one or more sgRNAs targeting exon 9 of fIL1RAP. In some embodiments, the CRISPR gene-editing system for the treatment of psoriatic arthritis comprises one or more sgRNAs targeting exon 10 of fIL1RAP. In some embodiments, the CRISPR gene-editing system for the treatment of psoriatic arthritis comprises one or more sgRNAs targeting exon 11 of fIL1RAP. In some embodiments, the CRISPR gene-editing system for the treatment of psoriatic arthritis comprises one or more sgRNAs targeting exon 12 of fIL1RAP. In some embodiments, the CRISPR gene-editing system for the treatment of psoriatic arthritis comprises one or more sgRNAs targeting exon 13 of fIL1RAP. In some embodiments, the CRISPR gene-editing system for the treatment of psoriatic arthritis comprises one or more sgRNAs targeting exon 14 of fIL1RAP.

[0241] In some embodiments, the CRISPR gene-editing system for the treatment of psoriatic arthritis comprises one or more sgRNAs targeting TGFBR1. In some embodiments, the CRISPR gene-editing system for the treatment of psoriatic arthritis comprises one or more sgRNAs targeting hTGFBR1. In some embodiments, the CRISPR gene-editing system for the treatment of psoriatic arthritis comprises one or more sgRNAs targeting cTGFBR1. In some embodiments, the CRISPR gene-editing system for the treatment of psoriatic arthritis comprises one or more sgRNAs targeting e TGFBR1. In some embodiments, the CRISPR gene-editing system for the treatment of psoriatic arthritis comprises one or more sgRNAs targeting fTGFBR1.

[0242] In some embodiments, the CRISPR gene-editing system for the treatment of psoriatic arthritis comprises one or more sgRNAs targeting exon 1 of hTGFBR1. In some embodiments, the CRISPR gene-editing system for the treatment of psoriatic arthritis comprises one or more sgRNAs targeting exon 2 of hTGFBR1. In some embodiments, the CRISPR gene-editing system for the treatment of psoriatic arthritis comprises one or more sgRNAs targeting exon 3 of hTGFBR1. In some embodiments, the CRISPR gene-editing system for the treatment of psoriatic arthritis comprises one or more sgRNAs targeting exon 4 of hTGFBR1. In some embodiments, the CRISPR gene-editing system for the treatment of psoriatic arthritis comprises one or more sgRNAs targeting exon 5 of hTGFBR1. In some embodiments, the CRISPR gene-editing system for the treatment of psoriatic arthritis comprises one or more sgRNAs targeting exon 6 of hTGFBR1. In some embodiments, the CRISPR gene-editing system for the treatment of psoriatic arthritis comprises one or more sgRNAs targeting exon 7 of hTGFBR1. In some embodiments, the CRISPR gene-editing system for the treatment of psoriatic arthritis comprises one or more sgRNAs targeting exon 8 of hTGFBR1. In some embodiments, the CRISPR gene-editing system for the treatment of psoriatic arthritis comprises one or more sgRNAs targeting exon 9 of hTGFBR1. In some embodiments, the CRISPR gene-editing system for the treatment of psoriatic arthritis comprises one or more sgRNAs targeting exon 10 of hTGFBR1. In some embodiments, the CRISPR gene-editing system for the treatment of psoriatic arthritis comprises one or more sgRNAs targeting exon 11 of hTGFBR1.

[0243] In some embodiments, the CRISPR gene-editing system for the treatment of psoriatic arthritis comprises one or more sgRNAs targeting exon 1 of cTGFBR1. In some embodiments, the CRISPR gene-editing system for the treatment of psoriatic arthritis comprises one or more sgRNAs targeting exon 2 of cTGFBR1. In some embodiments, the CRISPR gene-editing system for the treatment of psoriatic arthritis comprises one or more sgRNAs targeting exon 3 of cTGFBR1. In some embodiments, the CRISPR gene-editing system for the treatment of psoriatic arthritis comprises one or more sgRNAs targeting exon 4 of cTGFBR1. In some embodiments, the CRISPR gene-editing system for the treatment of psoriatic arthritis comprises one or more sgRNAs targeting exon 5 of cTGFBR1. In some embodiments, the CRISPR gene-editing system for the treatment of psoriatic arthritis comprises one or more sgRNAs targeting exon 6 of cTGFBR1. In some embodiments, the CRISPR gene-editing system for the treatment of psoriatic arthritis comprises one or more sgRNAs targeting exon 7 of cTGFBR1. In some embodiments, the CRISPR gene-editing system for the treatment of psoriatic arthritis comprises one or more sgRNAs targeting exon 8 of cTGFBR1. In some embodiments, the CRISPR gene-editing system for the treatment of psoriatic arthritis comprises one or more sgRNAs targeting exon 9 of cTGFBR1.

[0244] In some embodiments, the CRISPR gene-editing system for the treatment of psoriatic arthritis comprises one or more sgRNAs targeting exon 1 of eTGFBR1. In some embodiments, the CRISPR gene-editing system for the treatment of psoriatic arthritis comprises one or more sgRNAs targeting exon 2 of eTGFBR1. In some embodiments, the CRISPR gene-editing system for the treatment of psoriatic arthritis comprises one or more sgRNAs targeting exon 3 of eTGFBR1. In some embodiments, the CRISPR gene-editing system for the treatment of psoriatic arthritis comprises one or more sgRNAs targeting exon 4 of eTGFBR1. In some embodiments, the CRISPR gene-editing system for the treatment of psoriatic arthritis comprises one or more sgRNAs targeting exon 5 of eTGFBR1. In some embodiments, the CRISPR gene-editing system for the treatment of psoriatic arthritis comprises one or more sgRNAs targeting exon 6 of eTGFBR1. In some embodiments, the CRISPR gene-editing system for the treatment of psoriatic arthritis comprises one or more sgRNAs targeting exon 7 of eTGFBR1. In some embodiments, the CRISPR gene-editing system for the treatment of psoriatic arthritis comprises one or more sgRNAs targeting exon 8 of eTGFBR1. In some embodiments, the CRISPR gene-editing system for the treatment of psoriatic arthritis comprises one or more sgRNAs targeting exon 9 of eTGFBR1. In some embodiments, the CRISPR gene-editing system for the treatment of psoriatic arthritis comprises one or more sgRNAs targeting exon 10 of eTGFBR1. In some embodiments, the CRISPR gene-editing system for the treatment of psoriatic arthritis comprises one or more sgRNAs targeting exon 11 of eTGFBR1. In some embodiments, the CRISPR gene-editing system for the treatment of psoriatic arthritis comprises one or more sgRNAs targeting exon 12 of eTGFBR1.

[0245] In some embodiments, the CRISPR gene-editing system for the treatment of psoriatic arthritis comprises one or more sgRNAs targeting exon 1 of fTGFBR1. In some embodiments, the CRISPR gene-editing system for the treatment of psoriatic arthritis comprises one or more sgRNAs targeting exon 2 of fTGFBR1. In some embodiments, the CRISPR gene-editing system for the treatment of psoriatic arthritis comprises one or more sgRNAs targeting exon 3 of fTGFBR1. In some embodiments, the CRISPR gene-editing system for the treatment of psoriatic arthritis comprises one or more sgRNAs targeting exon 4 of fTGFBR1. In some embodiments, the CRISPR gene-editing system for the treatment of psoriatic arthritis comprises one or more sgRNAs targeting exon 5 of fTGFBR1. In some embodiments, the CRISPR gene-editing system for the treatment of psoriatic arthritis comprises one or more sgRNAs targeting exon 6 of fTGFBR1. In some embodiments, the CRISPR gene-editing system for the treatment of psoriatic arthritis comprises one or more sgRNAs targeting exon 7 of fTGFBR1. In some embodiments, the CRISPR gene-editing system for the treatment of psoriatic arthritis comprises one or more sgRNAs targeting exon 8 of fTGFBR1. In some embodiments, the CRISPR gene-editing system for the treatment of psoriatic arthritis comprises one or more sgRNAs targeting exon 9 of fTGFBR1. In some embodiments, the CRISPR gene-editing system for the treatment of psoriatic arthritis comprises one or more sgRNAs targeting exon 10 of fTGFBR1. In some embodiments, the CRISPR gene-editing system for the treatment of psoriatic arthritis comprises one or more sgRNAs targeting exon 11 of fTGFBR1.

[0246] In some embodiments, the CRISPR gene-editing system for the treatment of psoriatic arthritis comprises one or more sgRNAs targeting TGFBR2. In some embodiments, the CRISPR gene-editing system for the treatment of psoriatic arthritis comprises one or more sgRNAs targeting hTGFBR2. In some embodiments, the CRISPR gene-editing system for the treatment of psoriatic arthritis comprises one or more sgRNAs targeting cTGFBR2. In some embodiments, the CRISPR gene-editing system for the treatment of psoriatic arthritis comprises one or more sgRNAs targeting eTGFBR2. In some embodiments, the CRISPR gene-editing system for the treatment of psoriatic arthritis comprises one or more sgRNAs targeting fTGFBR2.

[0247] In some embodiments, the CRISPR gene-editing system for the treatment of psoriatic arthritis comprises one or more sgRNAs targeting exon 1 of hTGFBR2. In some embodiments, the CRISPR gene-editing system for the treatment of psoriatic arthritis comprises one or more sgRNAs targeting exon 2 of hTGFBR2. In some embodiments, the CRISPR gene-editing system for the treatment of psoriatic arthritis comprises one or more sgRNAs targeting exon 3 of hTGFBR2. In some embodiments, the CRISPR gene-editing system for the treatment of psoriatic arthritis comprises one or more sgRNAs targeting exon 4 of hTGFBR2. In some embodiments, the CRISPR gene-editing system for the treatment of psoriatic arthritis comprises one or more sgRNAs targeting exon 5 of hTGFBR2. In some embodiments, the CRISPR gene-editing system for the treatment of psoriatic arthritis comprises one or more sgRNAs targeting exon 6 of hTGFBR2. In some embodiments, the CRISPR gene-editing system for the treatment of psoriatic arthritis comprises one or more sgRNAs targeting exon 7 of hTGFBR2. In some embodiments, the CRISPR gene-editing system for the treatment of psoriatic arthritis comprises one or more sgRNAs targeting exon 8 of hTGFBR2. In some embodiments, the CRISPR gene-editing system for the treatment of psoriatic arthritis comprises one or more sgRNAs targeting exon 9 of hTGFBR2.

[0248] In some embodiments, the CRISPR gene-editing system for the treatment of psoriatic arthritis comprises one or more sgRNAs targeting exon 1 of cTGFBR2. In some embodiments, the CRISPR gene-editing system for the treatment of psoriatic arthritis comprises one or more sgRNAs targeting exon 2 of cTGFBR2. In some embodiments, the CRISPR gene-editing system for the treatment of psoriatic arthritis comprises one or more sgRNAs targeting exon 3 of cTGFBR2. In some embodiments, the CRISPR gene-editing system for the treatment of psoriatic arthritis comprises one or more sgRNAs targeting exon 4 of cTGFBR2. In some embodiments, the CRISPR gene-editing system for the treatment of psoriatic arthritis comprises one or more sgRNAs targeting exon 5 of cTGFBR2. In some embodiments, the CRISPR gene-editing system for the treatment of psoriatic arthritis comprises one or more sgRNAs targeting exon 6 of cTGFBR2. In some embodiments, the CRISPR gene-editing system for the treatment of psoriatic arthritis comprises one or more sgRNAs targeting exon 7 of cTGFBR2. In some embodiments, the CRISPR gene-editing system for the treatment of psoriatic arthritis comprises one or more sgRNAs targeting exon 8 of cTGFBR2.

[0249] In some embodiments, the CRISPR gene-editing system for the treatment of psoriatic arthritis comprises one or more sgRNAs targeting exon 1 of eTGFBR2. In some embodiments, the CRISPR gene-editing system for the treatment of psoriatic arthritis comprises one or more sgRNAs targeting exon 2 of eTGFBR2. In some embodiments, the CRISPR gene-editing system for the treatment of psoriatic arthritis comprises one or more sgRNAs targeting exon 3 of eTGFBR2. In some embodiments, the CRISPR gene-editing system for the treatment of psoriatic arthritis comprises one or more sgRNAs targeting exon 4 of eTGFBR2. In some embodiments, the CRISPR gene-editing system for the treatment of psoriatic arthritis comprises one or more sgRNAs targeting exon 5 of eTGFBR2. In some embodiments, the CRISPR gene-editing system for the treatment of psoriatic arthritis comprises one or more sgRNAs targeting exon 6 of eTGFBR2. In some embodiments, the CRISPR gene-editing system for the treatment of psoriatic arthritis comprises one or more sgRNAs targeting exon 7 of eTGFBR2. In some embodiments, the CRISPR gene-editing system for the treatment of psoriatic arthritis comprises one or more sgRNAs targeting exon 8 of eTGFBR2. In some embodiments, the CRISPR gene-editing system for the treatment of psoriatic arthritis comprises one or more sgRNAs targeting exon 9 of eTGFBR2. In some embodiments, the CRISPR gene-editing system for the treatment of psoriatic arthritis comprises one or more sgRNAs targeting exon 10 of eTGFBR2.

[0250] In some embodiments, the CRISPR gene-editing system for the treatment of psoriatic arthritis comprises one or more sgRNAs targeting exon 1 of fTGFBR2. In some embodiments, the CRISPR gene-editing system for the treatment of psoriatic arthritis comprises one or more sgRNAs targeting exon 2 of fTGFBR2. In some embodiments, the CRISPR gene-editing system for the treatment of psoriatic arthritis comprises one or more sgRNAs targeting exon 3 of fTGFBR2. In some embodiments, the CRISPR gene-editing system for the treatment of psoriatic arthritis comprises one or more sgRNAs targeting exon 4 of fTGFBR2. In some embodiments, the CRISPR gene-editing system for the treatment of psoriatic arthritis comprises one or more sgRNAs targeting exon 5 of fTGFBR2. In some embodiments, the CRISPR gene-editing system for the treatment of psoriatic arthritis comprises one or more sgRNAs targeting exon 6 of fTGFBR2. In some embodiments, the CRISPR gene-editing system for the treatment of psoriatic arthritis comprises one or more sgRNAs targeting exon 7 of fTGFBR2. In some embodiments, the CRISPR gene-editing system for the treatment of psoriatic arthritis comprises one or more sgRNAs targeting exon 8 of fTGFBR2.

[0251] In some embodiments, the CRISPR gene-editing system for the treatment of psoriatic arthritis comprises one or more sgRNAs targeting IL6R. In some embodiments, the CRISPR gene-editing system for the treatment of psoriatic arthritis comprises one or more sgRNAs targeting hIL6R. In some embodiments, the CRISPR gene-editing system for the treatment of psoriatic arthritis comprises one or more sgRNAs targeting cIL6R. In some embodiments, the CRISPR gene-editing system for the treatment of psoriatic arthritis comprises one or more sgRNAs targeting eIL6R. In some embodiments, the CRISPR gene-editing system for the treatment of psoriatic arthritis comprises one or more sgRNAs targeting fIL6R.

[0252] In some embodiments, the CRISPR gene-editing system for the treatment of psoriatic arthritis comprises one or more sgRNAs targeting exon 1 of hIL6R. In some embodiments, the CRISPR gene-editing system for the treatment of psoriatic arthritis comprises one or more sgRNAs targeting exon 2 of hIL6R. In some embodiments, the CRISPR gene-editing system for the treatment of psoriatic arthritis comprises one or more sgRNAs targeting exon 3 of hIL6R. In some embodiments, the CRISPR gene-editing system for the treatment of psoriatic arthritis comprises one or more sgRNAs targeting exon 4 of hIL6R. In some embodiments, the CRISPR gene-editing system for the treatment of psoriatic arthritis comprises one or more sgRNAs targeting exon 5 of hIL6R. In some embodiments, the CRISPR gene-editing system for the treatment of psoriatic arthritis comprises one or more sgRNAs targeting exon 6 of hIL6R. In some embodiments, the CRISPR gene-editing system for the treatment of psoriatic arthritis comprises one or more sgRNAs targeting exon 7 of hIL6R. In some embodiments, the CRISPR gene-editing system for the treatment of psoriatic arthritis comprises one or more sgRNAs targeting exon 8 of hIL6R. In some embodiments, the CRISPR gene-editing system for the treatment of psoriatic arthritis comprises one or more sgRNAs targeting exon 9 of hIL6R. In some embodiments, the CRISPR gene-editing system for the treatment of psoriatic arthritis comprises one or more sgRNAs targeting exon 10 of hIL6R. In some embodiments, the CRISPR gene-editing system for the treatment of psoriatic arthritis comprises one or more sgRNAs targeting exon 11 of hIL6R In some embodiments, the CRISPR gene-editing system for the treatment of psoriatic arthritis comprises one or more sgRNAs targeting exon 12 of hIL6R. In some embodiments, the CRISPR gene-editing system for the treatment of psoriatic arthritis comprises one or more sgRNAs targeting exon 13 of hIL6R. In some embodiments, the CRISPR gene-editing system for the treatment of psoriatic arthritis comprises one or more sgRNAs targeting exon 14 of hIL6R. In some embodiments, the CRISPR gene-editing system for the treatment of psoriatic arthritis comprises one or more sgRNAs targeting exon 15 of hIL6R.

[0253] In some embodiments, the CRISPR gene-editing system for the treatment of psoriatic arthritis comprises one or more sgRNAs targeting exon 1 of cIL6R. In some embodiments, the CRISPR gene-editing system for the treatment of psoriatic arthritis comprises one or more sgRNAs targeting exon 2 of cIL6R. In some embodiments, the CRISPR gene-editing system for the treatment of psoriatic arthritis comprises one or more sgRNAs targeting exon 3 of cIL6R. In some embodiments, the CRISPR gene-editing system for the treatment of psoriatic arthritis comprises one or more sgRNAs targeting exon 4 of cIL6R. In some embodiments, the CRISPR gene-editing system for the treatment of psoriatic arthritis comprises one or more sgRNAs targeting exon 5 of cIL6R. In some embodiments, the CRISPR gene-editing system for the treatment of psoriatic arthritis comprises one or more sgRNAs targeting exon 6 of cIL6R. In some embodiments, the CRISPR gene-editing system for the treatment of psoriatic arthritis comprises one or more sgRNAs targeting exon 7 of cIL6R. In some embodiments, the CRISPR gene-editing system for the treatment of psoriatic arthritis comprises one or more sgRNAs targeting exon 8 of cIL6R. In some embodiments, the CRISPR gene-editing system for the treatment of psoriatic arthritis comprises one or more sgRNAs targeting exon 9 of cIL6R. In some embodiments, the CRISPR gene-editing system for the treatment of psoriatic arthritis comprises one or more sgRNAs targeting exon 10 of cIL6R. In some embodiments, the CRISPR gene-editing system for the treatment of psoriatic arthritis comprises one or more sgRNAs targeting exon 11 of cIL6R. In some embodiments, the CRISPR gene-editing system for the treatment of psoriatic arthritis comprises one or more sgRNAs targeting exon 12 of cIL6R. In some embodiments, the CRISPR gene-editing system for the treatment of psoriatic arthritis comprises one or more sgRNAs targeting exon 13 of cIL6R.

[0254] In some embodiments, the CRISPR gene-editing system for the treatment of psoriatic arthritis comprises one or more sgRNAs targeting exon 1 of eIL6R. In some embodiments, the CRISPR gene-editing system for the treatment of psoriatic arthritis comprises one or more sgRNAs targeting exon 2 of eIL6R. In some embodiments, the CRISPR gene-editing system for the treatment of psoriatic arthritis comprises one or more sgRNAs targeting exon 3 of eIL6R. In some embodiments, the CRISPR gene-editing system for the treatment of psoriatic arthritis comprises one or more sgRNAs targeting exon 4 of eIL6R. In some embodiments, the CRISPR gene-editing system for the treatment of psoriatic arthritis comprises one or more sgRNAs targeting exon 5 of eIL6R. In some embodiments, the CRISPR gene-editing system for the treatment of psoriatic arthritis comprises one or more sgRNAs targeting exon 6 of eIL6R. In some embodiments, the CRISPR gene-editing system for the treatment of psoriatic arthritis comprises one or more sgRNAs targeting exon 7 of eIL6R. In some embodiments, the CRISPR gene-editing system for the treatment of psoriatic arthritis comprises one or more sgRNAs targeting exon 8 of eIL6R. In some embodiments, the CRISPR gene-editing system for the treatment of psoriatic arthritis comprises one or more sgRNAs targeting exon 9 of eIL6R. In some embodiments, the CRISPR gene-editing system for the treatment of psoriatic arthritis comprises one or more sgRNAs targeting exon 10 of eIL6R. In some embodiments, the CRISPR gene-editing system for the treatment of psoriatic arthritis comprises one or more sgRNAs targeting exon 11 of eIL6R.

[0255] In some embodiments, the CRISPR gene-editing system for the treatment of psoriatic arthritis comprises one or more sgRNAs targeting exon 1 of fIL6R. In some embodiments, the CRISPR gene-editing system for the treatment of psoriatic arthritis comprises one or more sgRNAs targeting exon 2 of fIL6R. In some embodiments, the CRISPR gene-editing system for the treatment of psoriatic arthritis comprises one or more sgRNAs targeting exon 3 of fIL6R. In some embodiments, the CRISPR gene-editing system for the treatment of psoriatic arthritis comprises one or more sgRNAs targeting exon 4 of fIL6R. In some embodiments, the CRISPR gene-editing system for the treatment of psoriatic arthritis comprises one or more sgRNAs targeting exon 5 of fIL6R. In some embodiments, the CRISPR gene-editing system for the treatment of psoriatic arthritis comprises one or more sgRNAs targeting exon 6 of fIL6R. In some embodiments, the CRISPR gene-editing system for the treatment of psoriatic arthritis comprises one or more sgRNAs targeting exon 7 of fIL6R. In some embodiments, the CRISPR gene-editing system for the treatment of psoriatic arthritis comprises one or more sgRNAs targeting exon 8 of fIL6R. In some embodiments, the CRISPR gene-editing system for the treatment of psoriatic arthritis comprises one or more sgRNAs targeting exon 9 of fIL6R. In some embodiments, the CRISPR gene-editing system for the treatment of psoriatic arthritis comprises one or more sgRNAs targeting exon 10 of fIL6R.

[0256] In some embodiments, the CRISPR gene-editing system for the treatment of psoriatic arthritis comprises one or more sgRNAs targeting IL6ST. In some embodiments, the CRISPR gene-editing system for the treatment of psoriatic arthritis comprises one or more sgRNAs targeting hIL6ST. In some embodiments, the CRISPR gene-editing system for the treatment of psoriatic arthritis comprises one or more sgRNAs targeting cIL6ST. In some embodiments, the CRISPR gene-editing system for the treatment of psoriatic arthritis comprises one or more sgRNAs targeting eIL6ST. In some embodiments, the CRISPR gene-editing system for the treatment of psoriatic arthritis comprises one or more sgRNAs targeting fIL6ST.

[0257] In some embodiments, the CRISPR gene-editing system for the treatment of psoriatic arthritis comprises one or more sgRNAs targeting exon 1 of hIL6ST. In some embodiments, the CRISPR gene-editing system for the treatment of psoriatic arthritis comprises one or more sgRNAs targeting exon 2 of hIL6ST. In some embodiments, the CRISPR gene-editing system for the treatment of psoriatic arthritis comprises one or more sgRNAs targeting exon 3 of hIL6ST. In some embodiments, the CRISPR gene-editing system for the treatment of psoriatic arthritis comprises one or more sgRNAs targeting exon 4 of hIL6ST. In some embodiments, the CRISPR gene-editing system for the treatment of psoriatic arthritis comprises one or more sgRNAs targeting exon 5 of hIL6ST. In some embodiments, the CRISPR gene-editing system for the treatment of psoriatic arthritis comprises one or more sgRNAs targeting exon 6 of hIL6ST. In some embodiments, the CRISPR gene-editing system for the treatment of psoriatic arthritis comprises one or more sgRNAs targeting exon 7 of hIL6ST. In some embodiments, the CRISPR gene-editing system for the treatment of psoriatic arthritis comprises one or more sgRNAs targeting exon 8 of hIL6ST. In some embodiments, the CRISPR gene-editing system for the treatment of psoriatic arthritis comprises one or more sgRNAs targeting exon 9 of hIL6ST. In some embodiments, the CRISPR gene-editing system for the treatment of psoriatic arthritis comprises one or more sgRNAs targeting exon 10 of hIL6ST. In some embodiments, the CRISPR gene-editing system for the treatment of psoriatic arthritis comprises one or more sgRNAs targeting exon 11 of hIL6ST. In some embodiments, the CRISPR gene-editing system for the treatment of psoriatic arthritis comprises one or more sgRNAs targeting exon 12 of hIL6ST. In some embodiments, the CRISPR gene-editing system for the treatment of psoriatic arthritis comprises one or more sgRNAs targeting exon 13 of hIL6ST. In some embodiments, the CRISPR gene-editing system for the treatment of psoriatic arthritis comprises one or more sgRNAs targeting exon 14 of hIL6ST. In some embodiments, the CRISPR gene-editing system for the treatment of psoriatic arthritis comprises one or more sgRNAs targeting exon 15 of hIL6ST. In some embodiments, the CRISPR gene-editing system for the treatment of psoriatic arthritis comprises one or more sgRNAs targeting exon 16 of hIL6ST. In some embodiments, the CRISPR gene-editing system for the treatment of psoriatic arthritis comprises one or more sgRNAs targeting exon 17 of hIL6ST. In some embodiments, the CRISPR gene-editing system for the treatment of psoriatic arthritis comprises one or more sgRNAs targeting exon 18 of hIL6ST. In some embodiments, the CRISPR gene-editing system for the treatment of psoriatic arthritis comprises one or more sgRNAs targeting exon 19 of hIL6ST.

[0258] In some embodiments, the CRISPR gene-editing system for the treatment of psoriatic arthritis comprises one or more sgRNAs targeting exon 1 of cIL6ST. In some embodiments, the CRISPR gene-editing system for the treatment of psoriatic arthritis comprises one or more sgRNAs targeting exon 2 of cIL6ST. In some embodiments, the CRISPR gene-editing system for the treatment of psoriatic arthritis comprises one or more sgRNAs targeting exon 3 of cIL6ST. In some embodiments, the CRISPR gene-editing system for the treatment of psoriatic arthritis comprises one or more sgRNAs targeting exon 4 of cIL6ST. In some embodiments, the CRISPR gene-editing system for the treatment of psoriatic arthritis comprises one or more sgRNAs targeting exon 5 of cIL6ST. In some embodiments, the CRISPR gene-editing system for the treatment of psoriatic arthritis comprises one or more sgRNAs targeting exon 6 of cIL6ST. In some embodiments, the CRISPR gene-editing system for the treatment of psoriatic arthritis comprises one or more sgRNAs targeting exon 7 of cIL6ST. In some embodiments, the CRISPR gene-editing system for the treatment of psoriatic arthritis comprises one or more sgRNAs targeting exon 8 of cIL6ST. In some embodiments, the CRISPR gene-editing system for the treatment of psoriatic arthritis comprises one or more sgRNAs targeting exon 9 of cIL6ST. In some embodiments, the CRISPR gene-editing system for the treatment of psoriatic arthritis comprises one or more sgRNAs targeting exon 10 of cIL6ST. In some embodiments, the CRISPR gene-editing system for the treatment of psoriatic arthritis comprises one or more sgRNAs targeting exon 11 of cIL6ST In some embodiments, the CRISPR gene-editing system for the treatment of psoriatic arthritis comprises one or more sgRNAs targeting exon 12 of cIL6ST. In some embodiments, the CRISPR gene-editing system for the treatment of psoriatic arthritis comprises one or more sgRNAs targeting exon 13 of cIL6ST. In some embodiments, the CRISPR gene-editing system for the treatment of psoriatic arthritis comprises one or more sgRNAs targeting exon 14 of cIL6ST. In some embodiments, the CRISPR gene-editing system for the treatment of psoriatic arthritis comprises one or more sgRNAs targeting exon 15 of cIL6ST. In some embodiments, the CRISPR gene-editing system for the treatment of psoriatic arthritis comprises one or more sgRNAs targeting exon 16 of cIL6ST. In some embodiments, the CRISPR gene-editing system for the treatment of psoriatic arthritis comprises one or more sgRNAs targeting exon 17 of cIL6ST. In some embodiments, the CRISPR gene-editing system for the treatment of psoriatic arthritis comprises one or more sgRNAs targeting exon 18 of cIL6ST.

[0259] In some embodiments, the CRISPR gene-editing system for the treatment of psoriatic arthritis comprises one or more sgRNAs targeting exon 1 of eIL6ST. In some embodiments, the CRISPR gene-editing system for the treatment of psoriatic arthritis comprises one or more sgRNAs targeting exon 2 of eIL6ST. In some embodiments, the CRISPR gene-editing system for the treatment of psoriatic arthritis comprises one or more sgRNAs targeting exon 3 of eIL6ST. In some embodiments, the CRISPR gene-editing system for the treatment of psoriatic arthritis comprises one or more sgRNAs targeting exon 4 of eIL6ST. In some embodiments, the CRISPR gene-editing system for the treatment of psoriatic arthritis comprises one or more sgRNAs targeting exon 5 of eIL6ST. In some embodiments, the CRISPR gene-editing system for the treatment of psoriatic arthritis comprises one or more sgRNAs targeting exon 6 of eIL6ST. In some embodiments, the CRISPR gene-editing system for the treatment of psoriatic arthritis comprises one or more sgRNAs targeting exon 7 of eIL6ST. In some embodiments, the CRISPR gene-editing system for the treatment of psoriatic arthritis comprises one or more sgRNAs targeting exon 8 of eIL6ST. In some embodiments, the CRISPR gene-editing system for the treatment of psoriatic arthritis comprises one or more sgRNAs targeting exon 9 of eIL6ST. In some embodiments, the CRISPR gene-editing system for the treatment of psoriatic arthritis comprises one or more sgRNAs targeting exon 10 of eIL6ST. In some embodiments, the CRISPR gene-editing system for the treatment of psoriatic arthritis comprises one or more sgRNAs targeting exon 11 of eIL6ST In some embodiments, the CRISPR gene-editing system for the treatment of psoriatic arthritis comprises one or more sgRNAs targeting exon 12 of eIL6ST. In some embodiments, the CRISPR gene-editing system for the treatment of psoriatic arthritis comprises one or more sgRNAs targeting exon 13 of eIL6ST. In some embodiments, the CRISPR gene-editing system for the treatment of psoriatic arthritis comprises one or more sgRNAs targeting exon 14 of eIL6ST. In some embodiments, the CRISPR gene-editing system for the treatment of psoriatic arthritis comprises one or more sgRNAs targeting exon 15 of eIL6ST. In some embodiments, the CRISPR gene-editing system for the treatment of psoriatic arthritis comprises one or more sgRNAs targeting exon 16 of eIL6ST. In some embodiments, the CRISPR gene-editing system for the treatment of psoriatic arthritis comprises one or more sgRNAs targeting exon 17 of eIL6ST. In some embodiments, the CRISPR gene-editing system for the treatment of psoriatic arthritis comprises one or more sgRNAs targeting exon 18 of eIL6ST.

[0260] In some embodiments, the CRISPR gene-editing system for the treatment of psoriatic arthritis comprises one or more sgRNAs targeting exon 1 of fIL6ST. In some embodiments, the CRISPR gene-editing system for the treatment of psoriatic arthritis comprises one or more sgRNAs targeting exon 2 of fIL6ST. In some embodiments, the CRISPR gene-editing system for the treatment of psoriatic arthritis comprises one or more sgRNAs targeting exon 3 of fIL6ST. In some embodiments, the CRISPR gene-editing system for the treatment of psoriatic arthritis comprises one or more sgRNAs targeting exon 4 of fIL6ST. In some embodiments, the CRISPR gene-editing system for the treatment of psoriatic arthritis comprises one or more sgRNAs targeting exon 5 of fIL6ST. In some embodiments, the CRISPR gene-editing system for the treatment of psoriatic arthritis comprises one or more sgRNAs targeting exon 6 of fIL6ST. In some embodiments, the CRISPR gene-editing system for the treatment of psoriatic arthritis comprises one or more sgRNAs targeting exon 7 of fIL6ST. In some embodiments, the CRISPR gene-editing system for the treatment of psoriatic arthritis comprises one or more sgRNAs targeting exon 8 of fIL6ST. In some embodiments, the CRISPR gene-editing system for the treatment of psoriatic arthritis comprises one or more sgRNAs targeting exon 9 of fIL6ST. In some embodiments, the CRISPR gene-editing system for the treatment of psoriatic arthritis comprises one or more sgRNAs targeting exon 10 of fIL6ST. In some embodiments, the CRISPR gene-editing system for the treatment of psoriatic arthritis comprises one or more sgRNAs targeting exon 11 of fIL6ST In some embodiments, the CRISPR gene-editing system for the treatment of psoriatic arthritis comprises one or more sgRNAs targeting exon 12 of fIL6ST. In some embodiments, the CRISPR gene-editing system for the treatment of psoriatic arthritis comprises one or more sgRNAs targeting exon 13 of fIL6ST. In some embodiments, the CRISPR gene-editing system for the treatment of psoriatic arthritis comprises one or more sgRNAs targeting exon 14 of fIL6ST. In some embodiments, the CRISPR gene-editing system for the treatment of psoriatic arthritis comprises one or more sgRNAs targeting exon 15 of fIL6ST. In some embodiments, the CRISPR gene-editing system for the treatment of psoriatic arthritis comprises one or more sgRNAs targeting exon 16 of fIL6ST. In some embodiments, the CRISPR gene-editing system for the treatment of psoriatic arthritis comprises one or more sgRNAs targeting exon 17 of fIL6ST. In some embodiments, the CRISPR gene-editing system for the treatment of psoriatic arthritis comprises one or more sgRNAs targeting exon 18 of fIL6ST. In some embodiments, the CRISPR gene-editing system for the treatment of psoriatic arthritis comprises one or more sgRNAs targeting exon 19 of fIL6ST. In some embodiments, the CRISPR gene-editing system for the treatment of psoriatic arthritis comprises one or more sgRNAs targeting exon 20 of fIL6ST.

[0261] In some embodiments, the CRISPR gene-editing system for the treatment of psoriatic arthritis comprises one or more sgRNAs targeting TNFRSF1A. In some embodiments, the CRISPR gene-editing system for the treatment of psoriatic arthritis comprises one or more sgRNAs targeting hTNFRSF1A. In some embodiments, the CRISPR gene-editing system for the treatment of psoriatic arthritis comprises one or more sgRNAs targeting cTNFRSF1A. In some embodiments, the CRISPR gene-editing system for the treatment of psoriatic arthritis comprises one or more sgRNAs targeting eTNFRSF1A. In some embodiments, the CRISPR gene-editing system for the treatment of psoriatic arthritis comprises one or more sgRNAs targeting fTNFRSF1A.

[0262] In some embodiments, the CRISPR gene-editing system for the treatment of psoriatic arthritis comprises one or more sgRNAs targeting exon 1 of hTNFRSF1A. In some embodiments, the CRISPR gene-editing system for the treatment of psoriatic arthritis comprises one or more sgRNAs targeting exon 2 of hTNFRSF1A. In some embodiments, the CRISPR gene-editing system for the treatment of psoriatic arthritis comprises one or more sgRNAs targeting exon 3 of hTNFRSF1A. In some embodiments, the CRISPR gene-editing system for the treatment of psoriatic arthritis comprises one or more sgRNAs targeting exon 4 of hTNFRSF1A. In some embodiments, the CRISPR gene-editing system for the treatment of psoriatic arthritis comprises one or more sgRNAs targeting exon 5 of hTNFRSF1A. In some embodiments, the CRISPR gene-editing system for the treatment of psoriatic arthritis comprises one or more sgRNAs targeting exon 6 of hTNFRSF1A. In some embodiments, the CRISPR gene-editing system for the treatment of psoriatic arthritis comprises one or more sgRNAs targeting exon 7 of hTNFRSF1A. In some embodiments, the CRISPR gene-editing system for the treatment of psoriatic arthritis comprises one or more sgRNAs targeting exon 8 of hTNFRSF1A. In some embodiments, the CRISPR gene-editing system for the treatment of psoriatic arthritis comprises one or more sgRNAs targeting exon 9 of hTNFRSF1A. In some embodiments, the CRISPR gene-editing system for the treatment of psoriatic arthritis comprises one or more sgRNAs targeting exon 10 of hTNFRSF1A. In some embodiments, the CRISPR gene-editing system for the treatment of psoriatic arthritis comprises one or more sgRNAs targeting exon 11 of hTNFRSF1A.

[0263] In some embodiments, the CRISPR gene-editing system for the treatment of psoriatic arthritis comprises one or more sgRNAs targeting exon 1 of cTNFRSF1A. In some embodiments, the CRISPR gene-editing system for the treatment of psoriatic arthritis comprises one or more sgRNAs targeting exon 2 of cTNFRSF1A. In some embodiments, the CRISPR gene-editing system for the treatment of psoriatic arthritis comprises one or more sgRNAs targeting exon 3 of cINFRSF1A. In some embodiments, the CRISPR gene-editing system for the treatment of psoriatic arthritis comprises one or more sgRNAs targeting exon 4 of cTNFRSF1A. In some embodiments, the CRISPR gene-editing system for the treatment of psoriatic arthritis comprises one or more sgRNAs targeting exon 5 of cTNFRSF1A. In some embodiments, the CRISPR gene-editing system for the treatment of psoriatic arthritis comprises one or more sgRNAs targeting exon 6 of cTNFRSF1A. In some embodiments, the CRISPR gene-editing system for the treatment of psoriatic arthritis comprises one or more sgRNAs targeting exon 7 of cTNFRSF1A. In some embodiments, the CRISPR gene-editing system for the treatment of psoriatic arthritis comprises one or more sgRNAs targeting exon 8 of cTNFRSF1A. In some embodiments, the CRISPR gene-editing system for the treatment of psoriatic arthritis comprises one or more sgRNAs targeting exon 9 of cTNFRSF1A. In some embodiments, the CRISPR gene-editing system for the treatment of psoriatic arthritis comprises one or more sgRNAs targeting exon 10 of cTNFRSF1A. In some embodiments, the CRISPR gene-editing system for the treatment of psoriatic arthritis comprises one or more sgRNAs targeting exon 11 of cTNFRSF1A.

[0264] In some embodiments, the CRISPR gene-editing system for the treatment of psoriatic arthritis comprises one or more sgRNAs targeting exon 1 of eTNFRSF1A. In some embodiments, the CRISPR gene-editing system for the treatment of psoriatic arthritis comprises one or more sgRNAs targeting exon 2 of eTNFRSF1A. In some embodiments, the CRISPR gene-editing system for the treatment of psoriatic arthritis comprises one or more sgRNAs targeting exon 3 of eTNFRSF1A. In some embodiments, the CRISPR gene-editing system for the treatment of psoriatic arthritis comprises one or more sgRNAs targeting exon 4 of eTNFRSF1A. In some embodiments, the CRISPR gene-editing system for the treatment of psoriatic arthritis comprises one or more sgRNAs targeting exon 5 of eTNFRSF1A. In some embodiments, the CRISPR gene-editing system for the treatment of psoriatic arthritis comprises one or more sgRNAs targeting exon 6 of eTNFRSF1A. In some embodiments, the CRISPR gene-editing system for the treatment of psoriatic arthritis comprises one or more sgRNAs targeting exon 7 of eTNFRSF1A. In some embodiments, the CRISPR gene-editing system for the treatment of psoriatic arthritis comprises one or more sgRNAs targeting exon 8 of eTNFRSF1A. In some embodiments, the CRISPR gene-editing system for the treatment of psoriatic arthritis comprises one or more sgRNAs targeting exon 9 of eTNFRSF1A. In some embodiments, the CRISPR gene-editing system for the treatment of psoriatic arthritis comprises one or more sgRNAs targeting exon 10 of eTNFRSF1A.

[0265] In some embodiments, the CRISPR gene-editing system for the treatment of psoriatic arthritis comprises one or more sgRNAs targeting exon 1 of fTNFRSF1A. In some embodiments, the CRISPR gene-editing system for the treatment of psoriatic arthritis comprises one or more sgRNAs targeting exon 2 of fTNFRSF1A. In some embodiments, the CRISPR gene-editing system for the treatment of psoriatic arthritis comprises one or more sgRNAs targeting exon 3 of fTNFRSF1A. In some embodiments, the CRISPR gene-editing system for the treatment of psoriatic arthritis comprises one or more sgRNAs targeting exon 4 of fTNFRSF1A. In some embodiments, the CRISPR gene-editing system for the treatment of psoriatic arthritis comprises one or more sgRNAs targeting exon 5 of fINFRSF1A. In some embodiments, the CRISPR gene-editing system for the treatment of psoriatic arthritis comprises one or more sgRNAs targeting exon 6 of fTNFRSF1A. In some embodiments, the CRISPR gene-editing system for the treatment of psoriatic arthritis comprises one or more sgRNAs targeting exon 7 of fTNFRSF1A. In some embodiments, the CRISPR gene-editing system for the treatment of psoriatic arthritis comprises one or more sgRNAs targeting exon 8 of fTNFRSF1A. In some embodiments, the CRISPR gene-editing system for the treatment of psoriatic arthritis comprises one or more sgRNAs targeting exon 9 of fTNFRSF1A. In some embodiments, the CRISPR gene-editing system for the treatment of psoriatic arthritis comprises one or more sgRNAs targeting exon 10 of fTNFRSF1A.

[0266] In some embodiments, the CRISPR gene-editing system for the treatment of psoriatic arthritis comprises one or more sgRNAs targeting TNFRSF1B. In some embodiments, the CRISPR gene-editing system for the treatment of psoriatic arthritis comprises one or more sgRNAs targeting hTNFRSF1B. In some embodiments, the CRISPR gene-editing system for the treatment of psoriatic arthritis comprises one or more sgRNAs targeting cTNFRSF1B. In some embodiments, the CRISPR gene-editing system for the treatment of psoriatic arthritis comprises one or more sgRNAs targeting eTNFRSF1B. In some embodiments, the CRISPR gene-editing system for the treatment of psoriatic arthritis comprises one or more sgRNAs targeting fTNFRSF1B.

[0267] In some embodiments, the CRISPR gene-editing system for the treatment of psoriatic arthritis comprises one or more sgRNAs targeting exon 1 of hTNFRSF1B. In some embodiments, the CRISPR gene-editing system for the treatment of psoriatic arthritis comprises one or more sgRNAs targeting exon 2 of hTNFRSF1B. In some embodiments, the CRISPR gene-editing system for the treatment of psoriatic arthritis comprises one or more sgRNAs targeting exon 3 of hTNFRSF1B. In some embodiments, the CRISPR gene-editing system for the treatment of psoriatic arthritis comprises one or more sgRNAs targeting exon 4 of hTNFRSF1B. In some embodiments, the CRISPR gene-editing system for the treatment of psoriatic arthritis comprises one or more sgRNAs targeting exon 5 of hTNFRSF1B. In some embodiments, the CRISPR gene-editing system for the treatment of psoriatic arthritis comprises one or more sgRNAs targeting exon 6 of hTNFRSF1B. In some embodiments, the CRISPR gene-editing system for the treatment of psoriatic arthritis comprises one or more sgRNAs targeting exon 7 of hTNFRSF1B. In some embodiments, the CRISPR gene-editing system for the treatment of psoriatic arthritis comprises one or more sgRNAs targeting exon 8 of hTNFRSF1B. In some embodiments, the CRISPR gene-editing system for the treatment of psoriatic arthritis comprises one or more sgRNAs targeting exon 9 of hTNFRSF1B. In some embodiments, the CRISPR gene-editing system for the treatment of psoriatic arthritis comprises one or more sgRNAs targeting exon 10 of hTNFRSF1B. In some embodiments, the CRISPR gene-editing system for the treatment of psoriatic arthritis comprises one or more sgRNAs targeting exon 11 of hTNFRSF1B In some embodiments, the CRISPR gene-editing system for the treatment of psoriatic arthritis comprises one or more sgRNAs targeting exon 12 of hTNFRSF1B. In some embodiments, the CRISPR gene-editing system for the treatment of psoriatic arthritis comprises one or more sgRNAs targeting exon 13 of hTNFRSF1B.

[0268] In some embodiments, the CRISPR gene-editing system for the treatment of psoriatic arthritis comprises one or more sgRNAs targeting exon 1 of cTNFRSF1B. In some embodiments, the CRISPR gene-editing system for the treatment of psoriatic arthritis comprises one or more sgRNAs targeting exon 2 of cTNFRSF1B. In some embodiments, the CRISPR gene-editing system for the treatment of psoriatic arthritis comprises one or more sgRNAs targeting exon 3 of cTNFRSF1B. In some embodiments, the CRISPR gene-editing system for the treatment of psoriatic arthritis comprises one or more sgRNAs targeting exon 4 of cTNFRSF1B. In some embodiments, the CRISPR gene-editing system for the treatment of psoriatic arthritis comprises one or more sgRNAs targeting exon 5 of cTNFRSF1B. In some embodiments, the CRISPR gene-editing system for the treatment of psoriatic arthritis comprises one or more sgRNAs targeting exon 6 of cTNFRSF1B. In some embodiments, the CRISPR gene-editing system for the treatment of psoriatic arthritis comprises one or more sgRNAs targeting exon 7 of cTNFRSF1B. In some embodiments, the CRISPR gene-editing system for the treatment of psoriatic arthritis comprises one or more sgRNAs targeting exon 8 of cTNFRSF1B. In some embodiments, the CRISPR gene-editing system for the treatment of psoriatic arthritis comprises one or more sgRNAs targeting exon 9 of cTNFRSF1B. In some embodiments, the CRISPR gene-editing system for the treatment of psoriatic arthritis comprises one or more sgRNAs targeting exon 10 of cTNFRSF1B. In some embodiments, the CRISPR gene-editing system for the treatment of psoriatic arthritis comprises one or more sgRNAs targeting exon 11 of cTNFRSF1B.

[0269] In some embodiments, the CRISPR gene-editing system for the treatment of psoriatic arthritis comprises one or more sgRNAs targeting exon 1 of eTNFRSF1B. In some embodiments, the CRISPR gene-editing system for the treatment of psoriatic arthritis comprises one or more sgRNAs targeting exon 2 of eTNFRSF1B. In some embodiments, the CRISPR gene-editing system for the treatment of psoriatic arthritis comprises one or more sgRNAs targeting exon 3 of eTNFRSF1B. In some embodiments, the CRISPR gene-editing system for the treatment of psoriatic arthritis comprises one or more sgRNAs targeting exon 4 of eTNFRSF1B. In some embodiments, the CRISPR gene-editing system for the treatment of psoriatic arthritis comprises one or more sgRNAs targeting exon 5 of eTNFRSF1B. In some embodiments, the CRISPR gene-editing system for the treatment of psoriatic arthritis comprises one or more sgRNAs targeting exon 6 of eTNFRSF1B. In some embodiments, the CRISPR gene-editing system for the treatment of psoriatic arthritis comprises one or more sgRNAs targeting exon 7 of eTNFRSF1B. In some embodiments, the CRISPR gene-editing system for the treatment of psoriatic arthritis comprises one or more sgRNAs targeting exon 8 of eTNFRSF1B. In some embodiments, the CRISPR gene-editing system for the treatment of psoriatic arthritis comprises one or more sgRNAs targeting exon 9 of eTNFRSF1B. In some embodiments, the CRISPR gene-editing system for the treatment of psoriatic arthritis comprises one or more sgRNAs targeting exon 10 of eTNFRSF1B. In some embodiments, the CRISPR gene-editing system for the treatment of psoriatic arthritis comprises one or more sgRNAs targeting exon 11 of eTNFRSF1B.

[0270] In some embodiments, the CRISPR gene-editing system for the treatment of psoriatic arthritis comprises one or more sgRNAs targeting exon 1 of fTNFRSF1B. In some embodiments, the CRISPR gene-editing system for the treatment of psoriatic arthritis comprises one or more sgRNAs targeting exon 2 of fTNFRSF1B. In some embodiments, the CRISPR gene-editing system for the treatment of psoriatic arthritis comprises one or more sgRNAs targeting exon 3 of fTNFRSF1B. In some embodiments, the CRISPR gene-editing system for the treatment of psoriatic arthritis comprises one or more sgRNAs targeting exon 4 of fTNFRSF1B. In some embodiments, the CRISPR gene-editing system for the treatment of psoriatic arthritis comprises one or more sgRNAs targeting exon 5 of fTNFRSF1B. In some embodiments, the CRISPR gene-editing system for the treatment of psoriatic arthritis comprises one or more sgRNAs targeting exon 6 of fTNFRSF1B. In some embodiments, the CRISPR gene-editing system for the treatment of psoriatic arthritis comprises one or more sgRNAs targeting exon 7 of fTNFRSF1B. In some embodiments, the CRISPR gene-editing system for the treatment of psoriatic arthritis comprises one or more sgRNAs targeting exon 8 of fTNFRSF1B. In some embodiments, the CRISPR gene-editing system for the treatment of psoriatic arthritis comprises one or more sgRNAs targeting exon 9 of fTNFRSF1B. In some embodiments, the CRISPR gene-editing system for the treatment of psoriatic arthritis comprises one or more sgRNAs targeting exon 10 of fTNFRSF1B.

[0271] In some embodiments, the CRISPR gene-editing system for the treatment of psoriatic arthritis comprises one or more sgRNAs targeting TNFRSF3. In some embodiments, the CRISPR gene-editing system for the treatment of psoriatic arthritis comprises one or more sgRNAs targeting hTNFRSF3. In some embodiments, the CRISPR gene-editing system for the treatment of psoriatic arthritis comprises one or more sgRNAs targeting cTNFRSF3. In some embodiments, the CRISPR gene-editing system for the treatment of psoriatic arthritis comprises one or more sgRNAs targeting eTNFRSF3. In some embodiments, the CRISPR gene-editing system for the treatment of psoriatic arthritis comprises one or more sgRNAs targeting fTNFRSF3.

[0272] In some embodiments, the CRISPR gene-editing system for the treatment of psoriatic arthritis comprises one or more sgRNAs targeting exon 1 of hTNFRSF3. In some embodiments, the CRISPR gene-editing system for the treatment of psoriatic arthritis comprises one or more sgRNAs targeting exon 2 of hTNFRSF3. In some embodiments, the CRISPR gene-editing system for the treatment of psoriatic arthritis comprises one or more sgRNAs targeting exon 3 of hTNFRSF3. In some embodiments, the CRISPR gene-editing system for the treatment of psoriatic arthritis comprises one or more sgRNAs targeting exon 4 of hTNFRSF3. In some embodiments, the CRISPR gene-editing system for the treatment of psoriatic arthritis comprises one or more sgRNAs targeting exon 5 of hTNFRSF3. In some embodiments, the CRISPR gene-editing system for the treatment of psoriatic arthritis comprises one or more sgRNAs targeting exon 6 of hTNFRSF3. In some embodiments, the CRISPR gene-editing system for the treatment of psoriatic arthritis comprises one or more sgRNAs targeting exon 7 of hTNFRSF3. In some embodiments, the CRISPR gene-editing system for the treatment of psoriatic arthritis comprises one or more sgRNAs targeting exon 8 of hTNFRSF3. In some embodiments, the CRISPR gene-editing system for the treatment of psoriatic arthritis comprises one or more sgRNAs targeting exon 9 of hTNFRSF3. In some embodiments, the CRISPR gene-editing system for the treatment of psoriatic arthritis comprises one or more sgRNAs targeting exon 10 of hTNFRSF3. In some embodiments, the CRISPR gene-editing system for the treatment of psoriatic arthritis comprises one or more sgRNAs targeting exon 11 of hTNFRSF3. In some embodiments, the CRISPR gene-editing system for the treatment of psoriatic arthritis comprises one or more sgRNAs targeting exon 12 of hTNFRSF3.

[0273] In some embodiments, the CRISPR gene-editing system for the treatment of psoriatic arthritis comprises one or more sgRNAs targeting exon 1 of cTNFRSF3. In some embodiments, the CRISPR gene-editing system for the treatment of psoriatic arthritis comprises one or more sgRNAs targeting exon 2 of cTNFRSF3. In some embodiments, the CRISPR gene-editing system for the treatment of psoriatic arthritis comprises one or more sgRNAs targeting exon 3 of cTNFRSF3. In some embodiments, the CRISPR gene-editing system for the treatment of psoriatic arthritis comprises one or more sgRNAs targeting exon 4 of cTNFRSF3. In some embodiments, the CRISPR gene-editing system for the treatment of psoriatic arthritis comprises one or more sgRNAs targeting exon 5 of cTNFRSF3. In some embodiments, the CRISPR gene-editing system for the treatment of psoriatic arthritis comprises one or more sgRNAs targeting exon 6 of cTNFRSF3. In some embodiments, the CRISPR gene-editing system for the treatment of psoriatic arthritis comprises one or more sgRNAs targeting exon 7 of cTNFRSF3. In some embodiments, the CRISPR gene-editing system for the treatment of psoriatic arthritis comprises one or more sgRNAs targeting exon 8 of cTNFRSF3. In some embodiments, the CRISPR gene-editing system for the treatment of psoriatic arthritis comprises one or more sgRNAs targeting exon 9 of cTNFRSF3. In some embodiments, the CRISPR gene-editing system for the treatment of psoriatic arthritis comprises one or more sgRNAs targeting exon 10 of cTNFRSF3.

[0274] In some embodiments, the CRISPR gene-editing system for the treatment of psoriatic arthritis comprises one or more sgRNAs targeting exon 1 of eTNFRSF3. In some embodiments, the CRISPR gene-editing system for the treatment of psoriatic arthritis comprises one or more sgRNAs targeting exon 2 of eTNFRSF3. In some embodiments, the CRISPR gene-editing system for the treatment of psoriatic arthritis comprises one or more sgRNAs targeting exon 3 of eTNFRSF3. In some embodiments, the CRISPR gene-editing system for the treatment of psoriatic arthritis comprises one or more sgRNAs targeting exon 4 of eTNFRSF3. In some embodiments, the CRISPR gene-editing system for the treatment of psoriatic arthritis comprises one or more sgRNAs targeting exon 5 of eTNFRSF3. In some embodiments, the CRISPR gene-editing system for the treatment of psoriatic arthritis comprises one or more sgRNAs targeting exon 6 of eTNFRSF3. In some embodiments, the CRISPR gene-editing system for the treatment of psoriatic arthritis comprises one or more sgRNAs targeting exon 7 of eTNFRSF3. In some embodiments, the CRISPR gene-editing system for the treatment of psoriatic arthritis comprises one or more sgRNAs targeting exon 8 of eTNFRSF3. In some embodiments, the CRISPR gene-editing system for the treatment of psoriatic arthritis comprises one or more sgRNAs targeting exon 9 of eTNFRSF3. In some embodiments, the CRISPR gene-editing system for the treatment of psoriatic arthritis comprises one or more sgRNAs targeting exon 10 of eTNFRSF3.

[0275] In some embodiments, the CRISPR gene-editing system for the treatment of psoriatic arthritis comprises one or more sgRNAs targeting exon 1 of fTNFRSF3. In some embodiments, the CRISPR gene-editing system for the treatment of psoriatic arthritis comprises one or more sgRNAs targeting exon 2 of fTNFRSF3. In some embodiments, the CRISPR gene-editing system for the treatment of psoriatic arthritis comprises one or more sgRNAs targeting exon 3 of fTNFRSF3. In some embodiments, the CRISPR gene-editing system for the treatment of psoriatic arthritis comprises one or more sgRNAs targeting exon 4 of fTNFRSF3. In some embodiments, the CRISPR gene-editing system for the treatment of psoriatic arthritis comprises one or more sgRNAs targeting exon 5 of fTNFRSF3. In some embodiments, the CRISPR gene-editing system for the treatment of psoriatic arthritis comprises one or more sgRNAs targeting exon 6 of fTNFRSF3. In some embodiments, the CRISPR gene-editing system for the treatment of psoriatic arthritis comprises one or more sgRNAs targeting exon 7 of fTNFRSF3. In some embodiments, the CRISPR gene-editing system for the treatment of psoriatic arthritis comprises one or more sgRNAs targeting exon 8 of fTNFRSF3. In some embodiments, the CRISPR gene-editing system for the treatment of psoriatic arthritis comprises one or more sgRNAs targeting exon 9 of fTNFRSF3. In some embodiments, the CRISPR gene-editing system for the treatment of psoriatic arthritis comprises one or more sgRNAs targeting exon 10 of fTNFRSF3.

[0276] In some embodiments, the CRISPR gene-editing system for the treatment of psoriatic arthritis comprises one or more sgRNAs targeting TNFRSF4. In some embodiments, the CRISPR gene-editing system for the treatment of psoriatic arthritis comprises one or more sgRNAs targeting hTNFRSF4. In some embodiments, the CRISPR gene-editing system for the treatment of psoriatic arthritis comprises one or more sgRNAs targeting cTNFRSF4. In some embodiments, the CRISPR gene-editing system for the treatment of psoriatic arthritis comprises one or more sgRNAs targeting eTNFRSF4. In some embodiments, the CRISPR gene-editing system for the treatment of psoriatic arthritis comprises one or more sgRNAs targeting fTNFRSF4.

[0277] In some embodiments, the CRISPR gene-editing system for the treatment of psoriatic arthritis comprises one or more sgRNAs targeting exon 1 of hTNFRSF4. In some embodiments, the CRISPR gene-editing system for the treatment of psoriatic arthritis comprises one or more sgRNAs targeting exon 2 of hTNFRSF4. In some embodiments, the CRISPR gene-editing system for the treatment of psoriatic arthritis comprises one or more sgRNAs targeting exon 3 of hTNFRSF4. In some embodiments, the CRISPR gene-editing system for the treatment of psoriatic arthritis comprises one or more sgRNAs targeting exon 4 of hTNFRSF4. In some embodiments, the CRISPR gene-editing system for the treatment of psoriatic arthritis comprises one or more sgRNAs targeting exon 5 of hTNFRSF4. In some embodiments, the CRISPR gene-editing system for the treatment of psoriatic arthritis comprises one or more sgRNAs targeting exon 6 of hTNFRSF4.

[0278] In some embodiments, the CRISPR gene-editing system for the treatment of psoriatic arthritis comprises one or more sgRNAs targeting exon 1 of cTNFRSF4. In some embodiments, the CRISPR gene-editing system for the treatment of psoriatic arthritis comprises one or more sgRNAs targeting exon 2 of cTNFRSF4. In some embodiments, the CRISPR gene-editing system for the treatment of psoriatic arthritis comprises one or more sgRNAs targeting exon 3 of cTNFRSF4. In some embodiments, the CRISPR gene-editing system for the treatment of psoriatic arthritis comprises one or more sgRNAs targeting exon 4 of cTNFRSF4. In some embodiments, the CRISPR gene-editing system for the treatment of psoriatic arthritis comprises one or more sgRNAs targeting exon 5 of cTNFRSF4. In some embodiments, the CRISPR gene-editing system for the treatment of psoriatic arthritis comprises one or more sgRNAs targeting exon 6 of cTNFRSF4. In some embodiments, the CRISPR gene-editing system for the treatment of psoriatic arthritis comprises one or more sgRNAs targeting exon 7 of cTNFRSF4.

[0279] In some embodiments, the CRISPR gene-editing system for the treatment of psoriatic arthritis comprises one or more sgRNAs targeting exon 1 of eTNFRSF4. In some embodiments, the CRISPR gene-editing system for the treatment of psoriatic arthritis comprises one or more sgRNAs targeting exon 2 of eTNFRSF4. In some embodiments, the CRISPR gene-editing system for the treatment of psoriatic arthritis comprises one or more sgRNAs targeting exon 3 of eTNFRSF4. In some embodiments, the CRISPR gene-editing system for the treatment of psoriatic arthritis comprises one or more sgRNAs targeting exon 4 of eTNFRSF4. In some embodiments, the CRISPR gene-editing system for the treatment of psoriatic arthritis comprises one or more sgRNAs targeting exon 5 of eTNFRSF4. In some embodiments, the CRISPR gene-editing system for the treatment of psoriatic arthritis comprises one or more sgRNAs targeting exon 6 of eTNFRSF4. In some embodiments, the CRISPR gene-editing system for the treatment of psoriatic arthritis comprises one or more sgRNAs targeting exon 7 of eTNFRSF4.

[0280] In some embodiments, the CRISPR gene-editing system for the treatment of psoriatic arthritis comprises one or more sgRNAs targeting exon 1 of fTNFRSF4. In some embodiments, the CRISPR gene-editing system for the treatment of psoriatic arthritis comprises one or more sgRNAs targeting exon 2 of fTNFRSF4. In some embodiments, the CRISPR gene-editing system for the treatment of psoriatic arthritis comprises one or more sgRNAs targeting exon 3 of fTNFRSF4. In some embodiments, the CRISPR gene-editing system for the treatment of psoriatic arthritis comprises one or more sgRNAs targeting exon 4 of fTNFRSF4. In some embodiments, the CRISPR gene-editing system for the treatment of psoriatic arthritis comprises one or more sgRNAs targeting exon 5 of fTNFRSF4. In some embodiments, the CRISPR gene-editing system for the treatment of psoriatic arthritis comprises one or more sgRNAs targeting exon 6 of fTNFRSF4. In some embodiments, the CRISPR gene-editing system for the treatment of psoriatic arthritis comprises one or more sgRNAs targeting exon 7 of fTNFRSF4.

[0281] In some embodiments, the CRISPR gene-editing system for the treatment of psoriatic arthritis comprises one or more sgRNAs targeting TNFRSF11A. In some embodiments, the CRISPR gene-editing system for the treatment of psoriatic arthritis comprises one or more sgRNAs targeting hTNFRSF11A. In some embodiments, the CRISPR gene-editing system for the treatment of psoriatic arthritis comprises one or more sgRNAs targeting cTNFRSF11A. In some embodiments, the CRISPR gene-editing system for the treatment of psoriatic arthritis comprises one or more sgRNAs targeting eTNFRSF11A. In some embodiments, the CRISPR gene-editing system for the treatment of psoriatic arthritis comprises one or more sgRNAs targeting fTNFRSF11A.

[0282] In some embodiments, the CRISPR gene-editing system for the treatment of psoriatic arthritis comprises one or more sgRNAs targeting exon 1 of hTNFRSF11A. In some embodiments, the CRISPR gene-editing system for the treatment of psoriatic arthritis comprises one or more sgRNAs targeting exon 2 of hTNFRSF11A. In some embodiments, the CRISPR gene-editing system for the treatment of psoriatic arthritis comprises one or more sgRNAs targeting exon 3 of hTNFRSF11A. In some embodiments, the CRISPR gene-editing system for the treatment of psoriatic arthritis comprises one or more sgRNAs targeting exon 4 of hTNFRSF11A. In some embodiments, the CRISPR gene-editing system for the treatment of psoriatic arthritis comprises one or more sgRNAs targeting exon 5 of hTNFRSF11A. In some embodiments, the CRISPR gene-editing system for the treatment of psoriatic arthritis comprises one or more sgRNAs targeting exon 6 of hTNFRSF11A. In some embodiments, the CRISPR gene-editing system for the treatment of psoriatic arthritis comprises one or more sgRNAs targeting exon 7 of hTNFRSF11A. In some embodiments, the CRISPR gene-editing system for the treatment of psoriatic arthritis comprises one or more sgRNAs targeting exon 8 of hTNFRSF11A. In some embodiments, the CRISPR gene-editing system for the treatment of psoriatic arthritis comprises one or more sgRNAs targeting exon 9 of hTNFRSF11A. In some embodiments, the CRISPR gene-editing system for the treatment of psoriatic arthritis comprises one or more sgRNAs targeting exon 10 of hTNFRSF11A. In some embodiments, the CRISPR gene-editing system for the treatment of psoriatic arthritis comprises one or more sgRNAs targeting exon 11 of hTNFRSF11A. In some embodiments, the CRISPR gene-editing system for the treatment of psoriatic arthritis comprises one or more sgRNAs targeting exon 12 of hTNFRSF11A.

[0283] In some embodiments, the CRISPR gene-editing system for the treatment of psoriatic arthritis comprises one or more sgRNAs targeting exon 1 of cTNFRSF11A. In some embodiments, the CRISPR gene-editing system for the treatment of psoriatic arthritis comprises one or more sgRNAs targeting exon 2 of cTNFRSF11A. In some embodiments, the CRISPR gene-editing system for the treatment of psoriatic arthritis comprises one or more sgRNAs targeting exon 3 of cTNFRSF11A. In some embodiments, the CRISPR gene-editing system for the treatment of psoriatic arthritis comprises one or more sgRNAs targeting exon 4 of cTNFRSF11A. In some embodiments, the CRISPR gene-editing system for the treatment of psoriatic arthritis comprises one or more sgRNAs targeting exon 5 of cTNFRSF11A. In some embodiments, the CRISPR gene-editing system for the treatment of psoriatic arthritis comprises one or more sgRNAs targeting exon 6 of cTNFRSF11A. In some embodiments, the CRISPR gene-editing system for the treatment of psoriatic arthritis comprises one or more sgRNAs targeting exon 7 of cTNFRSF11A. In some embodiments, the CRISPR gene-editing system for the treatment of psoriatic arthritis comprises one or more sgRNAs targeting exon 8 of cTNFRSF11A. In some embodiments, the CRISPR gene-editing system for the treatment of psoriatic arthritis comprises one or more sgRNAs targeting exon 9 of cTNFRSF11A. In some embodiments, the CRISPR gene-editing system for the treatment of psoriatic arthritis comprises one or more sgRNAs targeting exon 10 of cTNFRSF11A. In some embodiments, the CRISPR gene-editing system for the treatment of psoriatic arthritis comprises one or more sgRNAs targeting exon 11 of cTNFRSF11A.

[0284] In some embodiments, the CRISPR gene-editing system for the treatment of psoriatic arthritis comprises one or more sgRNAs targeting exon 1 of eTNFRSF11A. In some embodiments, the CRISPR gene-editing system for the treatment of psoriatic arthritis comprises one or more sgRNAs targeting exon 2 of eTNFRSF11A. In some embodiments, the CRISPR gene-editing system for the treatment of psoriatic arthritis comprises one or more sgRNAs targeting exon 3 of eTNFRSF11A. In some embodiments, the CRISPR gene-editing system for the treatment of psoriatic arthritis comprises one or more sgRNAs targeting exon 4 of eTNFRSF11A. In some embodiments, the CRISPR gene-editing system for the treatment of psoriatic arthritis comprises one or more sgRNAs targeting exon 5 of eTNFRSF11A. In some embodiments, the CRISPR gene-editing system for the treatment of psoriatic arthritis comprises one or more sgRNAs targeting exon 6 of eTNFRSF11A. In some embodiments, the CRISPR gene-editing system for the treatment of psoriatic arthritis comprises one or more sgRNAs targeting exon 7 of eTNFRSF11A. In some embodiments, the CRISPR gene-editing system for the treatment of psoriatic arthritis comprises one or more sgRNAs targeting exon 8 of eTNFRSF11A. In some embodiments, the CRISPR gene-editing system for the treatment of psoriatic arthritis comprises one or more sgRNAs targeting exon 9 of eTNFRSF11A. In some embodiments, the CRISPR gene-editing system for the treatment of psoriatic arthritis comprises one or more sgRNAs targeting exon 10 of eTNFRSF11A.

[0285] In some embodiments, the CRISPR gene-editing system for the treatment of psoriatic arthritis comprises one or more sgRNAs targeting exon 1 of fTNFRSF11A. In some embodiments, the CRISPR gene-editing system for the treatment of psoriatic arthritis comprises one or more sgRNAs targeting exon 2 of fTNFRSF11A. In some embodiments, the CRISPR gene-editing system for the treatment of psoriatic arthritis comprises one or more sgRNAs targeting exon 3 of fTNFRSF11A. In some embodiments, the CRISPR gene-editing system for the treatment of psoriatic arthritis comprises one or more sgRNAs targeting exon 4 of fTNFRSF11A. In some embodiments, the CRISPR gene-editing system for the treatment of psoriatic arthritis comprises one or more sgRNAs targeting exon 5 of fTNFRSF11A. In some embodiments, the CRISPR gene-editing system for the treatment of psoriatic arthritis comprises one or more sgRNAs targeting exon 6 of fTNFRSF11A. In some embodiments, the CRISPR gene-editing system for the treatment of psoriatic arthritis comprises one or more sgRNAs targeting exon 7 of fTNFRSF11A. In some embodiments, the CRISPR gene-editing system for the treatment of psoriatic arthritis comprises one or more sgRNAs targeting exon 8 of fTNFRSF11A. In some embodiments, the CRISPR gene-editing system for the treatment of psoriatic arthritis comprises one or more sgRNAs targeting exon 9 of fTNFRSF11A. In some embodiments, the CRISPR gene-editing system for the treatment of psoriatic arthritis comprises one or more sgRNAs targeting exon 10 of fTNFRSF11A. In some embodiments, the CRISPR gene-editing system for the treatment of psoriatic arthritis comprises one or more sgRNAs targeting exon 11 of fTNFRSF11A.

### D. Gout

[0286] In one aspect, the present disclosure encompasses treatments for gout and other crystallopathies affecting the joint, e.g., octacalcium phosphate and calcium pyrophosphate dihydrate in horses. In some embodiments, the gout treatment comprises a therapeutically effective amount of a Clustered Regularly Interspaced Short Palindromic Repeats (CRISPR) gene-editing system, the system comprising: (i) a CRISPR Associated (Cas) protein; and (ii) at least one guide RNA targeting IL1R1. In some embodiments, the gout treatment comprises a CRISPR gene-editing system targeting hIL1R1. In some embodiments, the gout treatment comprises a CRISPR gene-editing system targeting cIL1R1. In some embodiments, the gout treatment comprises a CRISP gene-editing system R targeting eIL1R1. In some embodiments, the gout treatment comprises a CRISPR gene-editing system targeting fIL1R1.

[0287] In some embodiments, the CRISPR gene-editing system for the treatment of gout comprises one or more sgRNAs targeting exon 1 of hIL1R1. In some embodiments, the CRISPR gene-editing system for the treatment of gout comprises one or more sgRNAs targeting exon 2 of hIL1R1. In some embodiments, the CRISPR gene-editing system for the treatment of gout comprises one or more sgRNAs targeting exon 3 of hIL1R1. In some embodiments, the CRISPR gene-editing system for the treatment of gout comprises one or more sgRNAs targeting exon 4 of hIL1R1. In some embodiments, the CRISPR gene-editing system for the treatment of gout comprises one or more sgRNAs targeting exon 5 of hIL1R1. In some embodiments, the CRISPR gene-editing system for the treatment of gout comprises one or more sgRNAs targeting exon 6 of hIL1R1. In some embodiments, the CRISPR gene-editing system for the treatment of gout comprises one or more sgRNAs targeting exon 7 of hIL1R1. In some embodiments, the CRISPR gene-editing system for the treatment of gout comprises one or more sgRNAs targeting exon 8 of hIL1R1. In some embodiments, the CRISPR gene-editing system for the treatment of gout comprises one or more sgRNAs targeting exon 9 of hIL1R1. In some embodiments, the CRISPR gene-editing system for the treatment of gout comprises one or more sgRNAs targeting exon 10 of hIL1R1. In some embodiments, the CRISPR gene-editing system for the treatment of gout comprises one or more sgRNAs targeting exon 11 of hIL1R1. In some embodiments, the CRISPR gene-editing system for the treatment of gout comprises one or more sgRNAs targeting exon 12 of hIL1R1. In some embodiments, the CRISPR gene-editing system for the treatment of gout comprises one or more sgRNAs targeting exon 13 of hIL1R1. In some embodiments, the CRISPR gene-editing system for the treatment of gout comprises one or more sgRNAs targeting exon 14 of hIL1R1. In some embodiments, the CRISPR gene-editing system for the treatment of gout comprises one or more sgRNAs targeting exon 15 of hIL1R1. In some embodiments, the CRISPR gene-editing system for the treatment of gout comprises one or more sgRNAs targeting exon 16 of hIL1R1. In some embodiments, the CRISPR gene-editing system for the treatment of gout comprises one or more sgRNAs targeting exon 17 of hIL1R1. In some embodiments, the CRISPR gene-editing system for the treatment of gout comprises one or more sgRNAs targeting exon 18 of hIL1R1. In some embodiments, the CRISPR gene-editing system for the treatment of gout comprises one or more sgRNAs targeting exon 19 of hIL1R1. In some embodiments, the CRISPR gene-editing system for the treatment of gout comprises one or more sgRNAs targeting exon 20 of hIL1R1. In some embodiments, the CRISPR gene-editing system for the treatment of gout comprises one or more sgRNAs targeting exon 21 of hIL1R1.

[0288] In some embodiments, the CRISPR gene-editing system for the treatment of gout comprises one or more sgRNAs targeting exon 1 of cIL1R1. In some embodiments, the CRISPR gene-editing system for the treatment of gout comprises one or more sgRNAs targeting exon 2 of cIL1R1. In some embodiments, the CRISPR gene-editing system for the treatment of gout comprises one or more sgRNAs targeting exon 3 of cIL1R1. In some embodiments, the CRISPR gene-editing system for the treatment of gout comprises one or more sgRNAs targeting exon 4 of cIL1R1. In some embodiments, the CRISPR gene-editing system for the treatment of gout comprises one or more sgRNAs targeting exon 5 of cIL1R1. In some embodiments, the CRISPR gene-editing system for the treatment of gout comprises one or more sgRNAs targeting exon 6 of cIL1R1. In some embodiments, the CRISPR gene-editing system for the treatment of gout comprises one or more sgRNAs targeting exon 7 of cIL1R1. In some embodiments, the CRISPR gene-editing system for the treatment of gout comprises one or more sgRNAs targeting exon 8 of cIL1R1. In some embodiments, the CRISPR gene-editing system for the treatment of gout comprises one or more sgRNAs targeting exon 9 of cIL1R1. In some embodiments, the CRISPR gene-editing system for the treatment of gout comprises one or more sgRNAs targeting exon 10 of cIL1R1. In some embodiments, the CRISPR gene-editing system for the treatment of gout comprises one or more sgRNAs targeting exon 11 of cIL1R1. In some embodiments, the CRISPR gene-editing system for the treatment of gout comprises one or more sgRNAs targeting exon 12 of cIL1R1. In some embodiments, the CRISPR gene-editing system for the treatment of gout comprises one or more sgRNAs targeting exon 13 of cIL1R1. In some embodiments, the CRISPR gene-editing system for the treatment of gout comprises one or more sgRNAs targeting exon 14 of cIL1R1. In some embodiments, the CRISPR gene-editing system for the treatment of gout comprises one or more sgRNAs targeting exon 15 of cIL1R1. In some embodiments, the CRISPR gene-editing system for the treatment of gout comprises one or more sgRNAs targeting exon 16 of cIL1R1.

[0289] In some embodiments, the CRISPR gene-editing system for the treatment of gout comprises one or more sgRNAs targeting exon 1 of eIL1R1. In some embodiments, the CRISPR gene-editing system for the treatment of gout comprises one or more sgRNAs targeting exon 2 of eIL1R1. In some embodiments, the CRISPR gene-editing system for the treatment of gout comprises one or more sgRNAs targeting exon 3 of eIL1R1. In some embodiments, the CRISPR gene-editing system for the treatment of gout comprises one or more sgRNAs targeting exon 4 of eIL1R1. In some embodiments, the CRISPR gene-editing system for the treatment of gout comprises one or more sgRNAs targeting exon 5 of eIL1R1. In some embodiments, the CRISPR gene-editing system for the treatment of gout comprises one or more sgRNAs targeting exon 6 of eIL1R1. In some embodiments, the CRISPR gene-editing system for the treatment of gout comprises one or more sgRNAs targeting exon 7 of eIL1R1. In some embodiments, the CRISPR gene-editing system for the treatment of gout comprises one or more sgRNAs targeting exon 8 of eIL1R1. In some embodiments, the CRISPR gene-editing system for the treatment of gout comprises one or more sgRNAs targeting exon 9 of eIL1R1. In some embodiments, the CRISPR gene-editing system for the treatment of gout comprises one or more sgRNAs targeting exon 10 of eIL1R1. In some embodiments, the CRISPR gene-editing system for the treatment of gout comprises one or more sgRNAs targeting exon 11 of eIL1R1. In some embodiments, the CRISPR gene-editing system for the treatment of gout comprises one or more sgRNAs targeting exon 12 of eIL1R1. In some embodiments, the CRISPR gene-editing system for the treatment of gout comprises one or more sgRNAs targeting exon 13 of eIL1R1. In some embodiments, the CRISPR gene-editing system for the treatment of gout comprises one or more sgRNAs targeting exon 14 of eIL1R1. In some embodiments, the CRISPR gene-editing system for the treatment of gout comprises one or more sgRNAs targeting exon 15 of eIL1R1.

[0290] In some embodiments, the CRISPR gene-editing system for the treatment of gout comprises one or more sgRNAs targeting exon 1 of fIL1R1. In some embodiments, the CRISPR gene-editing system for the treatment of gout comprises one or more sgRNAs targeting exon 2 of fIL1R1. In some embodiments, the CRISPR gene-editing system for the treatment of gout comprises one or more sgRNAs targeting exon 3 of fIL1R1. In some embodiments, the CRISPR gene-editing system for the treatment of gout comprises one or more sgRNAs targeting exon 4 of fIL1R1. In some embodiments, the CRISPR gene-editing system for the treatment of gout comprises one or more sgRNAs targeting exon 5 of fIL1R1. In some embodiments, the CRISPR gene-editing system for the treatment of gout comprises one or more sgRNAs targeting exon 6 of fIL1R1. In some embodiments, the CRISPR gene-editing system for the treatment of gout comprises one or more sgRNAs targeting exon 7 of fIL1R1. In some embodiments, the CRISPR gene-editing system for the treatment of gout comprises one or more sgRNAs targeting exon 8 of fIL1R1. In some embodiments, the CRISPR gene-editing system for the treatment of gout comprises one or more sgRNAs targeting exon 9 of fIL1R1. In some embodiments, the CRISPR gene-editing system for the treatment of gout comprises one or more sgRNAs targeting exon 10 of fIL1R1. In some embodiments, the CRISPR gene-editing system for the treatment of gout comprises one or more sgRNAs targeting exon 11 of fIL1R1. In some embodiments, the CRISPR gene-editing system for the treatment of gout comprises one or more sgRNAs targeting exon 12 of fIL1R1. In some embodiments, the CRISPR gene-editing system for the treatment of gout comprises one or more sgRNAs targeting exon 13 of fIL1R1. In some embodiments, the CRISPR gene-editing system for the treatment of gout comprises one or more sgRNAs targeting exon 14 of fIL1R1. In some embodiments, the CRISPR gene-editing system for the treatment of gout comprises one or more sgRNAs targeting exon 15 of fIL1R1. In some embodiments, the CRISPR gene-editing system for the treatment of gout comprises one or more sgRNAs targeting exon 16 of fIL1R1. In some embodiments, the CRISPR gene-editing system for the treatment of gout comprises one or more sgRNAs targeting exon 17 of fIL1R1. In some embodiments, the CRISPR gene-editing system for the treatment of gout comprises one or more sgRNAs targeting exon 18 of fIL1R1.

[0291] In some embodiments, the CRISPR gene-editing system for the treatment of gout comprises one or more sgRNAs targeting IL1RAP. In some embodiments, the CRISPR gene-editing system for the treatment of gout comprises one or more sgRNAs targeting hIL1RAP. In some embodiments, the CRISPR gene-editing system for the treatment of gout comprises one or more sgRNAs targeting cIL1RAP. In some embodiments, the CRISPR gene-editing system for the treatment of gout comprises one or more sgRNAs targeting eIL1RAP. In some embodiments, the CRISPR gene-editing system for the treatment of gout comprises one or more sgRNAs targeting fIL1RAP.

[0292] In some embodiments, the CRISPR gene-editing system for the treatment of gout comprises one or more sgRNAs targeting exon 1 of hIL1RAP. In some embodiments, the CRISPR gene-editing system for the treatment of gout comprises one or more sgRNAs targeting exon 2 of hIL1RAP. In some embodiments, the CRISPR gene-editing system for the treatment of gout comprises one or more sgRNAs targeting exon 3 of hIL1RAP. In some embodiments, the CRISPR gene-editing system for the treatment of gout comprises one or more sgRNAs targeting exon 4 of hIL1RAP. In some embodiments, the CRISPR gene-editing system for the treatment of gout comprises one or more sgRNAs targeting exon 5 of hIL1RAP. In some embodiments, the CRISPR gene-editing system for the treatment of gout comprises one or more sgRNAs targeting exon 6 of hIL1RAP. In some embodiments, the CRISPR gene-editing system for the treatment of gout comprises one or more sgRNAs targeting exon 7 of hIL1RAP. In some embodiments, the CRISPR gene-editing system for the treatment of gout comprises one or more sgRNAs targeting exon 8 of hIL1RAP. In some embodiments, the CRISPR gene-editing system for the treatment of gout comprises one or more sgRNAs targeting exon 9 of hIL1RAP. In some embodiments, the CRISPR gene-editing system for the treatment of gout comprises one or more sgRNAs targeting exon 10 of hIL1RAP. In some embodiments, the CRISPR gene-editing system for the treatment of gout comprises one or more sgRNAs targeting exon 11 of hIL1RAP. In some embodiments, the CRISPR gene-editing system for the treatment of gout comprises one or more sgRNAs targeting exon 12 of hIL1RAP. In some embodiments, the CRISPR gene-editing system for the treatment of gout comprises one or more sgRNAs targeting exon 13 of hIL1RAP. In some embodiments, the CRISPR gene-editing system for the treatment of gout comprises one or more sgRNAs targeting exon 14 of hIL1RAP. In some embodiments, the CRISPR gene-editing system for the treatment of gout comprises one or more sgRNAs targeting exon 15 of hIL1RAP. In some embodiments, the CRISPR gene-editing system for the treatment of gout comprises one or more sgRNAs targeting exon 16 of hIL1RAP. In some embodiments, the CRISPR gene-editing system for the treatment of gout comprises one or more sgRNAs targeting exon 17 of hIL1RAP.

[0293] In some embodiments, the CRISPR gene-editing system for the treatment of gout comprises one or more sgRNAs targeting exon 1 of cIL1RAP. In some embodiments, the CRISPR gene-editing system for the treatment of gout comprises one or more sgRNAs targeting exon 2 of cIL1RAP. In some embodiments, the CRISPR gene-editing system for the treatment of gout comprises one or more sgRNAs targeting exon 3 of cIL1RAP. In some embodiments, the CRISPR gene-editing system for the treatment of gout comprises one or more sgRNAs targeting exon 4 of cIL1RAP. In some embodiments, the CRISPR gene-editing system for the treatment of gout comprises one or more sgRNAs targeting exon 5 of cIL1RAP. In some embodiments, the CRISPR gene-editing system for the treatment of gout comprises one or more sgRNAs targeting exon 6 of cIL1RAP. In some embodiments, the CRISPR gene-editing system for the treatment of gout comprises one or more sgRNAs targeting exon 7 of cIL1RAP. In some embodiments, the CRISPR gene-editing system for the treatment of gout comprises one or more sgRNAs targeting exon 8 of cIL1RAP. In some embodiments, the CRISPR gene-editing system for the treatment of gout comprises one or more sgRNAs targeting exon 9 of cIL1RAP. In some embodiments, the CRISPR gene-editing system for the treatment of gout comprises one or more sgRNAs targeting exon 10 of cIL1RAP. In some embodiments, the CRISPR gene-editing system for the treatment of gout comprises one or more sgRNAs targeting exon 11 of cIL1RAP. In some embodiments, the CRISPR gene-editing system for the treatment of gout comprises one or more sgRNAs targeting exon 12 of cIL1RAP. In some embodiments, the CRISPR gene-editing system for the treatment of gout comprises one or more sgRNAs targeting exon 13 of cIL1RAP. In some embodiments, the CRISPR gene-editing system for the treatment of gout comprises one or more sgRNAs targeting exon 14 of cIL1RAP. In some embodiments, the CRISPR gene-editing system for the treatment of gout comprises one or more sgRNAs targeting exon 15 of cIL1RAP. In some embodiments, the CRISPR gene-editing system for the treatment of gout comprises one or more sgRNAs targeting exon 16 of cIL1RAP.

[0294] In some embodiments, the CRISPR gene-editing system for the treatment of gout comprises one or more sgRNAs targeting exon 1 of eIL1RAP. In some embodiments, the CRISPR gene-editing system for the treatment of gout comprises one or more sgRNAs targeting exon 2 of eIL1RAP. In some embodiments, the CRISPR gene-editing system for the treatment of gout comprises one or more sgRNAs targeting exon 3 of eIL1RAP. In some embodiments, the CRISPR gene-editing system for the treatment of gout comprises one or more sgRNAs targeting exon 4 of eIL1RAP. In some embodiments, the CRISPR gene-editing system for the treatment of gout comprises one or more sgRNAs targeting exon 5 of eIL1RAP. In some embodiments, the CRISPR gene-editing system for the treatment of gout comprises one or more sgRNAs targeting exon 6 of eIL1RAP. In some embodiments, the CRISPR gene-editing system for the treatment of gout comprises one or more sgRNAs targeting exon 7 of eIL1RAP. In some embodiments, the CRISPR gene-editing system for the treatment of gout comprises one or more sgRNAs targeting exon 8 of eIL1RAP. In some embodiments, the CRISPR gene-editing system for the treatment of gout comprises one or more sgRNAs targeting exon 9 of eIL1RAP. In some embodiments, the CRISPR gene-editing system for the treatment of gout comprises one or more sgRNAs targeting exon 10 of eIL1RAP. In some embodiments, the CRISPR gene-editing system for the treatment of gout comprises one or more sgRNAs targeting exon 11 of eIL1RAP. In some embodiments, the CRISPR gene-editing system for the treatment of gout comprises one or more sgRNAs targeting exon 12 of eIL1RAP. In some embodiments, the CRISPR gene-editing system for the treatment of gout comprises one or more sgRNAs targeting exon 13 of eIL1RAP.

[0295] In some embodiments, the CRISPR gene-editing system for the treatment of gout comprises one or more sgRNAs targeting exon 1 of fIL1RAP. In some embodiments, the CRISPR gene-editing system for the treatment of gout comprises one or more sgRNAs targeting exon 2 of fIL1RAP. In some embodiments, the CRISPR gene-editing system for the treatment of gout comprises one or more sgRNAs targeting exon 3 of fIL1RAP. In some embodiments, the CRISPR gene-editing system for the treatment of gout comprises one or more sgRNAs targeting exon 4 of fIL1RAP. In some embodiments, the CRISPR gene-editing system for the treatment of gout comprises one or more sgRNAs targeting exon 5 of fIL1RAP. In some embodiments, the CRISPR gene-editing system for the treatment of gout comprises one or more sgRNAs targeting exon 6 of fIL1RAP. In some embodiments, the CRISPR gene-editing system for the treatment of gout comprises one or more sgRNAs targeting exon 7 of fIL1RAP. In some embodiments, the CRISPR gene-editing system for the treatment of gout comprises one or more sgRNAs targeting exon 8 of fIL1RAP. In some embodiments, the CRISPR gene-editing system for the treatment of gout comprises one or more sgRNAs targeting exon 9 of fIL1RAP. In some embodiments, the CRISPR gene-editing system for the treatment of gout comprises one or more sgRNAs targeting exon 10 of fIL1RAP. In some embodiments, the CRISPR gene-editing system for the treatment of gout comprises one or more sgRNAs targeting exon 11 of fIL1RAP. In some embodiments, the CRISPR gene-editing system for the treatment of gout comprises one or more sgRNAs targeting exon 12 of fIL1RAP. In some embodiments, the CRISPR gene-editing system for the treatment of gout comprises one or more sgRNAs targeting exon 13 of fIL1RAP. In some embodiments, the CRISPR gene-editing system for the treatment of gout comprises one or more sgRNAs targeting exon 14 of fIL1RAP.

[0296] In some embodiments, the CRISPR gene-editing system for the treatment of gout comprises one or more sgRNAs targeting TGFBR1. In some embodiments, the CRISPR gene-editing system for the treatment of gout comprises one or more sgRNAs targeting hTGFBR1. In some embodiments, the CRISPR gene-editing system for the treatment of gout comprises one or more sgRNAs targeting cTGFBR1. In some embodiments, the CRISPR gene-editing system for the treatment of gout comprises one or more sgRNAs targeting e TGFBR1. In some embodiments, the CRISPR gene-editing system for the treatment of gout comprises one or more sgRNAs targeting fTGFBR1.

[0297] In some embodiments, the CRISPR gene-editing system for the treatment of gout comprises one or more sgRNAs targeting exon 1 of hTGFBR1. In some embodiments, the CRISPR gene-editing system for the treatment of gout comprises one or more sgRNAs targeting exon 2 of hTGFBR1. In some embodiments, the CRISPR gene-editing system for the treatment of gout comprises one or more sgRNAs targeting exon 3 of hTGFBR1. In some embodiments, the CRISPR gene-editing system for the treatment of gout comprises one or more sgRNAs targeting exon 4 of hTGFBR1. In some embodiments, the CRISPR gene-editing system for the treatment of gout comprises one or more sgRNAs targeting exon 5 of hTGFBR1. In some embodiments, the CRISPR gene-editing system for the treatment of gout comprises one or more sgRNAs targeting exon 6 of hTGFBR1. In some embodiments, the CRISPR gene-editing system for the treatment of gout comprises one or more sgRNAs targeting exon 7 of hTGFBR1. In some embodiments, the CRISPR gene-editing system for the treatment of gout comprises one or more sgRNAs targeting exon 8 of hTGFBR1. In some embodiments, the CRISPR gene-editing system for the treatment of gout comprises one or more sgRNAs targeting exon 9 of hTGFBR1. In some embodiments, the CRISPR gene-editing system for the treatment of gout comprises one or more sgRNAs targeting exon 10 of hTGFBR1. In some embodiments, the CRISPR gene-editing system for the treatment of gout comprises one or more sgRNAs targeting exon 11 of hTGFBR1.

[0298] In some embodiments, the CRISPR gene-editing system for the treatment of gout comprises one or more sgRNAs targeting exon 1 of cTGFBR1. In some embodiments, the CRISPR gene-editing system for the treatment of gout comprises one or more sgRNAs targeting exon 2 of cTGFBR1. In some embodiments, the CRISPR gene-editing system for the treatment of gout comprises one or more sgRNAs targeting exon 3 of cTGFBR1. In some embodiments, the CRISPR gene-editing system for the treatment of gout comprises one or more sgRNAs targeting exon 4 of cTGFBR1. In some embodiments, the CRISPR gene-editing system for the treatment of gout comprises one or more sgRNAs targeting exon 5 of cTGFBR1. In some embodiments, the CRISPR gene-editing system for the treatment of gout comprises one or more sgRNAs targeting exon 6 of cTGFBR1. In some embodiments, the CRISPR gene-editing system for the treatment of gout comprises one or more sgRNAs targeting exon 7 of cTGFBR1. In some embodiments, the CRISPR gene-editing system for the treatment of gout comprises one or more sgRNAs targeting exon 8 of cTGFBR1. In some embodiments, the CRISPR gene-editing system for the treatment of gout comprises one or more sgRNAs targeting exon 9 of cTGFBR1.

[0299] In some embodiments, the CRISPR gene-editing system for the treatment of gout comprises one or more sgRNAs targeting exon 1 of eTGFBR1. In some embodiments, the CRISPR gene-editing system for the treatment of gout comprises one or more sgRNAs targeting exon 2 of eTGFBR1. In some embodiments, the CRISPR gene-editing system for the treatment of gout comprises one or more sgRNAs targeting exon 3 of eTGFBR1. In some embodiments, the CRISPR gene-editing system for the treatment of gout comprises one or more sgRNAs targeting exon 4 of eTGFBR1. In some embodiments, the CRISPR gene-editing system for the treatment of gout comprises one or more sgRNAs targeting exon 5 of eTGFBR1. In some embodiments, the CRISPR gene-editing system for the treatment of gout comprises one or more sgRNAs targeting exon 6 of eTGFBR1. In some embodiments, the CRISPR gene-editing system for the treatment of gout comprises one or more sgRNAs targeting exon 7 of eTGFBR1. In some embodiments, the CRISPR gene-editing system for the treatment of gout comprises one or more sgRNAs targeting exon 8 of eTGFBR1. In some embodiments, the CRISPR gene-editing system for the treatment of gout comprises one or more sgRNAs targeting exon 9 of eTGFBR1. In some embodiments, the CRISPR gene-editing system for the treatment of gout comprises one or more sgRNAs targeting exon 10 of eTGFBR1. In some embodiments, the CRISPR gene-editing system for the treatment of gout comprises one or more sgRNAs targeting exon 11 of eTGFBR1. In some embodiments, the CRISPR gene-editing system for the treatment of gout comprises one or more sgRNAs targeting exon 12 of eTGFBR1.

[0300] In some embodiments, the CRISPR gene-editing system for the treatment of gout comprises one or more sgRNAs targeting exon 1 of fTGFBR1. In some embodiments, the CRISPR gene-editing system for the treatment of gout comprises one or more sgRNAs targeting exon 2 of fTGFBR1. In some embodiments, the CRISPR gene-editing system for the treatment of gout comprises one or more sgRNAs targeting exon 3 of fTGFBR1. In some embodiments, the CRISPR gene-editing system for the treatment of gout comprises one or more sgRNAs targeting exon 4 of fTGFBR1. In some embodiments, the CRISPR gene-editing system for the treatment of gout comprises one or more sgRNAs targeting exon 5 of fTGFBR1. In some embodiments, the CRISPR gene-editing system for the treatment of gout comprises one or more sgRNAs targeting exon 6 of fTGFBR1. In some embodiments, the CRISPR gene-editing system for the treatment of gout comprises one or more sgRNAs targeting exon 7 of fTGFBR1. In some embodiments, the CRISPR gene-editing system for the treatment of gout comprises one or more sgRNAs targeting exon 8 of fTGFBR1. In some embodiments, the CRISPR gene-editing system for the treatment of gout comprises one or more sgRNAs targeting exon 9 of fTGFBR1. In some embodiments, the CRISPR gene-editing system for the treatment of gout comprises one or more sgRNAs targeting exon 10 of fTGFBR1. In some embodiments, the CRISPR gene-editing system for the treatment of gout comprises one or more sgRNAs targeting exon 11 of fTGFBR1.

[0301] In some embodiments, the CRISPR gene-editing system for the treatment of gout comprises one or more sgRNAs targeting TGFBR2. In some embodiments, the CRISPR gene-editing system for the treatment of gout comprises one or more sgRNAs targeting hTGFBR2. In some embodiments, the CRISPR gene-editing system for the treatment of gout comprises one or more sgRNAs targeting cTGFBR2. In some embodiments, the CRISPR gene-editing system for the treatment of gout comprises one or more sgRNAs targeting eTGFBR2. In some embodiments, the CRISPR gene-editing system for the treatment of gout comprises one or more sgRNAs targeting fTGFBR2.

[0302] In some embodiments, the CRISPR gene-editing system for the treatment of gout comprises one or more sgRNAs targeting exon 1 of hTGFBR2. In some embodiments, the CRISPR gene-editing system for the treatment of gout comprises one or more sgRNAs targeting exon 2 of hTGFBR2. In some embodiments, the CRISPR gene-editing system for the treatment of gout comprises one or more sgRNAs targeting exon 3 of hTGFBR2. In some embodiments, the CRISPR gene-editing system for the treatment of gout comprises one or more sgRNAs targeting exon 4 of hTGFBR2. In some embodiments, the CRISPR gene-editing system for the treatment of gout comprises one or more sgRNAs targeting exon 5 of hTGFBR2. In some embodiments, the CRISPR gene-editing system for the treatment of gout comprises one or more sgRNAs targeting exon 6 of hTGFBR2. In some embodiments, the CRISPR gene-editing system for the treatment of gout comprises one or more sgRNAs targeting exon 7 of hTGFBR2. In some embodiments, the CRISPR gene-editing system for the treatment of gout comprises one or more sgRNAs targeting exon 8 of hTGFBR2. In some embodiments, the CRISPR gene-editing system for the treatment of gout comprises one or more sgRNAs targeting exon 9 of hTGFBR2.

[0303] In some embodiments, the CRISPR gene-editing system for the treatment of gout comprises one or more sgRNAs targeting exon 1 of cTGFBR2. In some embodiments, the CRISPR gene-editing system for the treatment of gout comprises one or more sgRNAs targeting exon 2 of cTGFBR2. In some embodiments, the CRISPR gene-editing system for the treatment of gout comprises one or more sgRNAs targeting exon 3 of cTGFBR2. In some embodiments, the CRISPR gene-editing system for the treatment of gout comprises one or more sgRNAs targeting exon 4 of cTGFBR2. In some embodiments, the CRISPR gene-editing system for the treatment of gout comprises one or more sgRNAs targeting exon 5 of cTGFBR2. In some embodiments, the CRISPR gene-editing system for the treatment of gout comprises one or more sgRNAs targeting exon 6 of cTGFBR2. In some embodiments, the CRISPR gene-editing system for the treatment of gout comprises one or more sgRNAs targeting exon 7 of cTGFBR2. In some embodiments, the CRISPR gene-editing system for the treatment of gout comprises one or more sgRNAs targeting exon 8 of cTGFBR2.

[0304] In some embodiments, the CRISPR gene-editing system for the treatment of gout comprises one or more sgRNAs targeting exon 1 of eTGFBR2. In some embodiments, the CRISPR gene-editing system for the treatment of gout comprises one or more sgRNAs targeting exon 2 of eTGFBR2. In some embodiments, the CRISPR gene-editing system for the treatment of gout comprises one or more sgRNAs targeting exon 3 of eTGFBR2. In some embodiments, the CRISPR gene-editing system for the treatment of gout comprises one or more sgRNAs targeting exon 4 of eTGFBR2. In some embodiments, the CRISPR gene-editing system for the treatment of gout comprises one or more sgRNAs targeting exon 5 of eTGFBR2. In some embodiments, the CRISPR gene-editing system for the treatment of gout comprises one or more sgRNAs targeting exon 6 of eTGFBR2. In some embodiments, the CRISPR gene-editing system for the treatment of gout comprises one or more sgRNAs targeting exon 7 of eTGFBR2. In some embodiments, the CRISPR gene-editing system for the treatment of gout comprises one or more sgRNAs targeting exon 8 of eTGFBR2. In some embodiments, the CRISPR gene-editing system for the treatment of gout comprises one or more sgRNAs targeting exon 9 of eTGFBR2. In some embodiments, the CRISPR gene-editing system for the treatment of gout comprises one or more sgRNAs targeting exon 10 of eTGFBR2.

[0305] In some embodiments, the CRISPR gene-editing system for the treatment of gout comprises one or more sgRNAs targeting exon 1 of fTGFBR2. In some embodiments, the CRISPR gene-editing system for the treatment of gout comprises one or more sgRNAs targeting exon 2 of fTGFBR2. In some embodiments, the CRISPR gene-editing system for the treatment of gout comprises one or more sgRNAs targeting exon 3 of fTGFBR2. In some embodiments, the CRISPR gene-editing system for the treatment of gout comprises one or more sgRNAs targeting exon 4 of fTGFBR2. In some embodiments, the CRISPR gene-editing system for the treatment of gout comprises one or more sgRNAs targeting exon 5 of fTGFBR2. In some embodiments, the CRISPR gene-editing system for the treatment of gout comprises one or more sgRNAs targeting exon 6 of fTGFBR2. In some embodiments, the CRISPR gene-editing system for the treatment of gout comprises one or more sgRNAs targeting exon 7 of fTGFBR2. In some embodiments, the CRISPR gene-editing system for the treatment of gout comprises one or more sgRNAs targeting exon 8 of fTGFBR2.

[0306] In some embodiments, the CRISPR gene-editing system for the treatment of gout comprises one or more sgRNAs targeting IL6R. In some embodiments, the CRISPR gene-editing system for the treatment of gout comprises one or more sgRNAs targeting hIL6R. In some embodiments, the CRISPR gene-editing system for the treatment of gout comprises one or more sgRNAs targeting cIL6R. In some embodiments, the CRISPR gene-editing system for the treatment of gout comprises one or more sgRNAs targeting eIL6R. In some embodiments, the CRISPR gene-editing system for the treatment of gout comprises one or more sgRNAs targeting fIL6R.

[0307] In some embodiments, the CRISPR gene-editing system for the treatment of gout comprises one or more sgRNAs targeting exon 1 of hIL6R. In some embodiments, the CRISPR gene-editing system for the treatment of gout comprises one or more sgRNAs targeting exon 2 of hIL6R. In some embodiments, the CRISPR gene-editing system for the treatment of gout comprises one or more sgRNAs targeting exon 3 of hIL6R. In some embodiments, the CRISPR gene-editing system for the treatment of gout comprises one or more sgRNAs targeting exon 4 of hIL6R. In some embodiments, the CRISPR gene-editing system for the treatment of gout comprises one or more sgRNAs targeting exon 5 of hIL6R. In some embodiments, the CRISPR gene-editing system for the treatment of gout comprises one or more sgRNAs targeting exon 6 of hIL6R. In some embodiments, the CRISPR gene-editing system for the treatment of gout comprises one or more sgRNAs targeting exon 7 of hIL6R. In some embodiments, the CRISPR gene-editing system for the treatment of gout comprises one or more sgRNAs targeting exon 8 of hIL6R. In some embodiments, the CRISPR gene-editing system for the treatment of gout comprises one or more sgRNAs targeting exon 9 of hIL6R. In some embodiments, the CRISPR gene-editing system for the treatment of gout comprises one or more sgRNAs targeting exon 10 of hIL6R. In some embodiments, the CRISPR gene-editing system for the treatment of gout comprises one or more sgRNAs targeting exon 11 of hIL6R In some embodiments, the CRISPR gene-editing system for the treatment of gout comprises one or more sgRNAs targeting exon 12 of hIL6R. In some embodiments, the CRISPR gene-editing system for the treatment of gout comprises one or more sgRNAs targeting exon 13 of hIL6R. In some embodiments, the CRISPR gene-editing system for the treatment of gout comprises one or more sgRNAs targeting exon 14 of hIL6R. In some embodiments, the CRISPR gene-editing system for the treatment of gout comprises one or more sgRNAs targeting exon 15 of hIL6R.

[0308] In some embodiments, the CRISPR gene-editing system for the treatment of gout comprises one or more sgRNAs targeting exon 1 of cIL6R. In some embodiments, the CRISPR gene-editing system for the treatment of gout comprises one or more sgRNAs targeting exon 2 of cIL6R. In some embodiments, the CRISPR gene-editing system for the treatment of gout comprises one or more sgRNAs targeting exon 3 of cIL6R. In some embodiments, the CRISPR gene-editing system for the treatment of gout comprises one or more sgRNAs targeting exon 4 of cIL6R. In some embodiments, the CRISPR gene-editing system for the treatment of gout comprises one or more sgRNAs targeting exon 5 of cIL6R. In some embodiments, the CRISPR gene-editing system for the treatment of gout comprises one or more sgRNAs targeting exon 6 of cIL6R. In some embodiments, the CRISPR gene-editing system for the treatment of gout comprises one or more sgRNAs targeting exon 7 of cIL6R. In some embodiments, the CRISPR gene-editing system for the treatment of gout comprises one or more sgRNAs targeting exon 8 of cIL6R. In some embodiments, the CRISPR gene-editing system for the treatment of gout comprises one or more sgRNAs targeting exon 9 of cIL6R. In some embodiments, the CRISPR gene-editing system for the treatment of gout comprises one or more sgRNAs targeting exon 10 of cIL6R. In some embodiments, the CRISPR gene-editing system for the treatment of gout comprises one or more sgRNAs targeting exon 11 of cIL6R. In some embodiments, the CRISPR gene-editing system for the treatment of gout comprises one or more sgRNAs targeting exon 12 of cIL6R. In some embodiments, the CRISPR gene-editing system for the treatment of gout comprises one or more sgRNAs targeting exon 13 of cIL6R.

[0309] In some embodiments, the CRISPR gene-editing system for the treatment of gout comprises one or more sgRNAs targeting exon 1 of eIL6R. In some embodiments, the CRISPR gene-editing system for the treatment of gout comprises one or more sgRNAs targeting exon 2 of eIL6R. In some embodiments, the CRISPR gene-editing system for the treatment of gout comprises one or more sgRNAs targeting exon 3 of eIL6R. In some embodiments, the CRISPR gene-editing system for the treatment of gout comprises one or more sgRNAs targeting exon 4 of eIL6R. In some embodiments, the CRISPR gene-editing system for the treatment of gout comprises one or more sgRNAs targeting exon 5 of eIL6R. In some embodiments, the CRISPR gene-editing system for the treatment of gout comprises one or more sgRNAs targeting exon 6 of eIL6R. In some embodiments, the CRISPR gene-editing system for the treatment of gout comprises one or more sgRNAs targeting exon 7 of eIL6R. In some embodiments, the CRISPR gene-editing system for the treatment of gout comprises one or more sgRNAs targeting exon 8 of eIL6R. In some embodiments, the CRISPR gene-editing system for the treatment of gout comprises one or more sgRNAs targeting exon 9 of eIL6R. In some embodiments, the CRISPR gene-editing system for the treatment of gout comprises one or more sgRNAs targeting exon 10 of eIL6R. In some embodiments, the CRISPR gene-editing system for the treatment of gout comprises one or more sgRNAs targeting exon 11 of eIL6R.

[0310] In some embodiments, the CRISPR gene-editing system for the treatment of gout comprises one or more sgRNAs targeting exon 1 of fIL6R. In some embodiments, the CRISPR gene-editing system for the treatment of gout comprises one or more sgRNAs targeting exon 2 of fIL6R. In some embodiments, the CRISPR gene-editing system for the treatment of gout comprises one or more sgRNAs targeting exon 3 of fIL6R. In some embodiments, the CRISPR gene-editing system for the treatment of gout comprises one or more sgRNAs targeting exon 4 of fIL6R. In some embodiments, the CRISPR gene-editing system for the treatment of gout comprises one or more sgRNAs targeting exon 5 of fIL6R. In some embodiments, the CRISPR gene-editing system for the treatment of gout comprises one or more sgRNAs targeting exon 6 of fIL6R. In some embodiments, the CRISPR gene-editing system for the treatment of gout comprises one or more sgRNAs targeting exon 7 of fIL6R. In some embodiments, the CRISPR gene-editing system for the treatment of gout comprises one or more sgRNAs targeting exon 8 of fIL6R. In some embodiments, the CRISPR gene-editing system for the treatment of gout comprises one or more sgRNAs targeting exon 9 of fIL6R. In some embodiments, the CRISPR gene-editing system for the treatment of gout comprises one or more sgRNAs targeting exon 10 of fIL6R.

[0311] In some embodiments, the CRISPR gene-editing system for the treatment of gout comprises one or more sgRNAs targeting IL6ST. In some embodiments, the CRISPR gene-editing system for the treatment of gout comprises one or more sgRNAs targeting hIL6ST. In some embodiments, the CRISPR gene-editing system for the treatment of gout comprises one or more sgRNAs targeting cIL6ST. In some embodiments, the CRISPR gene-editing system for the treatment of gout comprises one or more sgRNAs targeting eIL6ST. In some embodiments, the CRISPR gene-editing system for the treatment of gout comprises one or more sgRNAs targeting fIL6ST.

[0312] In some embodiments, the CRISPR gene-editing system for the treatment of gout comprises one or more sgRNAs targeting exon 1 of hIL6ST. In some embodiments, the CRISPR gene-editing system for the treatment of gout comprises one or more sgRNAs targeting exon 2 of hIL6ST. In some embodiments, the CRISPR gene-editing system for the treatment of gout comprises one or more sgRNAs targeting exon 3 of hIL6ST. In some embodiments, the CRISPR gene-editing system for the treatment of gout comprises one or more sgRNAs targeting exon 4 of hIL6ST. In some embodiments, the CRISPR gene-editing system for the treatment of gout comprises one or more sgRNAs targeting exon 5 of hIL6ST. In some embodiments, the CRISPR gene-editing system for the treatment of gout comprises one or more sgRNAs targeting exon 6 of hIL6ST. In some embodiments, the CRISPR gene-editing system for the treatment of gout comprises one or more sgRNAs targeting exon 7 of hIL6ST. In some embodiments, the CRISPR gene-editing system for the treatment of gout comprises one or more sgRNAs targeting exon 8 of hIL6ST. In some embodiments, the CRISPR gene-editing system for the treatment of gout comprises one or more sgRNAs targeting exon 9 of hIL6ST. In some embodiments, the CRISPR gene-editing system for the treatment of gout comprises one or more sgRNAs targeting exon 10 of hIL6ST. In some embodiments, the CRISPR gene-editing system for the treatment of gout comprises one or more sgRNAs targeting exon 11 of hIL6ST. In some embodiments, the CRISPR gene-editing system for the treatment of gout comprises one or more sgRNAs targeting exon 12 of hIL6ST. In some embodiments, the CRISPR gene-editing system for the treatment of gout comprises one or more sgRNAs targeting exon 13 of hIL6ST. In some embodiments, the CRISPR gene-editing system for the treatment of gout comprises one or more sgRNAs targeting exon 14 of hIL6ST. In some embodiments, the CRISPR gene-editing system for the treatment of gout comprises one or more sgRNAs targeting exon 15 of hIL6ST. In some embodiments, the CRISPR gene-editing system for the treatment of gout comprises one or more sgRNAs targeting exon 16 of hIL6ST. In some embodiments, the CRISPR gene-editing system for the treatment of gout comprises one or more sgRNAs targeting exon 17 of hIL6ST. In some embodiments, the CRISPR gene-editing system for the treatment of gout comprises one or more sgRNAs targeting exon 18 of hIL6ST. In some embodiments, the CRISPR gene-editing system for the treatment of gout comprises one or more sgRNAs targeting exon 19 of hIL6ST.

[0313] In some embodiments, the CRISPR gene-editing system for the treatment of gout comprises one or more sgRNAs targeting exon 1 of cIL6ST. In some embodiments, the CRISPR gene-editing system for the treatment of gout comprises one or more sgRNAs targeting exon 2 of cIL6ST. In some embodiments, the CRISPR gene-editing system for the treatment of gout comprises one or more sgRNAs targeting exon 3 of cIL6ST. In some embodiments, the CRISPR gene-editing system for the treatment of gout comprises one or more sgRNAs targeting exon 4 of cIL6ST. In some embodiments, the CRISPR gene-editing system for the treatment of gout comprises one or more sgRNAs targeting exon 5 of cIL6ST. In some embodiments, the CRISPR gene-editing system for the treatment of gout comprises one or more sgRNAs targeting exon 6 of cIL6ST. In some embodiments, the CRISPR gene-editing system for the treatment of gout comprises one or more sgRNAs targeting exon 7 of cIL6ST. In some embodiments, the CRISPR gene-editing system for the treatment of gout comprises one or more sgRNAs targeting exon 8 of cIL6ST. In some embodiments, the CRISPR gene-editing system for the treatment of gout comprises one or more sgRNAs targeting exon 9 of cIL6ST. In some embodiments, the CRISPR gene-editing system for the treatment of gout comprises one or more sgRNAs targeting exon 10 of cIL6ST. In some embodiments, the CRISPR gene-editing system for the treatment of gout comprises one or more sgRNAs targeting exon 11 of cIL6ST In some embodiments, the CRISPR gene-editing system for the treatment of gout comprises one or more sgRNAs targeting exon 12 of cIL6ST. In some embodiments, the CRISPR gene-editing system for the treatment of gout comprises one or more sgRNAs targeting exon 13 of cIL6ST. In some embodiments, the CRISPR gene-editing system for the treatment of gout comprises one or more sgRNAs targeting exon 14 of cIL6ST. In some embodiments, the CRISPR gene-editing system for the treatment of gout comprises one or more sgRNAs targeting exon 15 of cIL6ST. In some embodiments, the CRISPR gene-editing system for the treatment of gout comprises one or more sgRNAs targeting exon 16 of cIL6ST. In some embodiments, the CRISPR gene-editing system for the treatment of gout comprises one or more sgRNAs targeting exon 17 of cIL6ST. In some embodiments, the CRISPR gene-editing system for the treatment of gout comprises one or more sgRNAs targeting exon 18 of cIL6ST.

[0314] In some embodiments, the CRISPR gene-editing system for the treatment of gout comprises one or more sgRNAs targeting exon 1 of eIL6ST. In some embodiments, the CRISPR gene-editing system for the treatment of gout comprises one or more sgRNAs targeting exon 2 of eIL6ST. In some embodiments, the CRISPR gene-editing system for the treatment of gout comprises one or more sgRNAs targeting exon 3 of eIL6ST. In some embodiments, the CRISPR gene-editing system for the treatment of gout comprises one or more sgRNAs targeting exon 4 of eIL6ST. In some embodiments, the CRISPR gene-editing system for the treatment of gout comprises one or more sgRNAs targeting exon 5 of eIL6ST. In some embodiments, the CRISPR gene-editing system for the treatment of gout comprises one or more sgRNAs targeting exon 6 of eIL6ST. In some embodiments, the CRISPR gene-editing system for the treatment of gout comprises one or more sgRNAs targeting exon 7 of eIL6ST. In some embodiments, the CRISPR gene-editing system for the treatment of gout comprises one or more sgRNAs targeting exon 8 of eIL6ST. In some embodiments, the CRISPR gene-editing system for the treatment of gout comprises one or more sgRNAs targeting exon 9 of eIL6ST. In some embodiments, the CRISPR gene-editing system for the treatment of gout comprises one or more sgRNAs targeting exon 10 of eIL6ST. In some embodiments, the CRISPR gene-editing system for the treatment of gout comprises one or more sgRNAs targeting exon 11 of eIL6ST In some embodiments, the CRISPR gene-editing system for the treatment of gout comprises one or more sgRNAs targeting exon 12 of eIL6ST. In some embodiments, the CRISPR gene-editing system for the treatment of gout comprises one or more sgRNAs targeting exon 13 of eIL6ST. In some embodiments, the CRISPR gene-editing system for the treatment of gout comprises one or more sgRNAs targeting exon 14 of eIL6ST. In some embodiments, the CRISPR gene-editing system for the treatment of gout comprises one or more sgRNAs targeting exon 15 of eIL6ST. In some embodiments, the CRISPR gene-editing system for the treatment of gout comprises one or more sgRNAs targeting exon 16 of eIL6ST. In some embodiments, the CRISPR gene-editing system for the treatment of gout comprises one or more sgRNAs targeting exon 17 of eIL6ST. In some embodiments, the CRISPR gene-editing system for the treatment of gout comprises one or more sgRNAs targeting exon 18 of eIL6ST.

[0315] In some embodiments, the CRISPR gene-editing system for the treatment of gout comprises one or more sgRNAs targeting exon 1 of fIL6ST. In some embodiments, the CRISPR gene-editing system for the treatment of gout comprises one or more sgRNAs targeting exon 2 of fIL6ST. In some embodiments, the CRISPR gene-editing system for the treatment of gout comprises one or more sgRNAs targeting exon 3 of fIL6ST. In some embodiments, the CRISPR gene-editing system for the treatment of gout comprises one or more sgRNAs targeting exon 4 of fIL6ST. In some embodiments, the CRISPR gene-editing system for the treatment of gout comprises one or more sgRNAs targeting exon 5 of fIL6ST. In some embodiments, the CRISPR gene-editing system for the treatment of gout comprises one or more sgRNAs targeting exon 6 of fIL6ST. In some embodiments, the CRISPR gene-editing system for the treatment of gout comprises one or more sgRNAs targeting exon 7 of fIL6ST. In some embodiments, the CRISPR gene-editing system for the treatment of gout comprises one or more sgRNAs targeting exon 8 of fIL6ST. In some embodiments, the CRISPR gene-editing system for the treatment of gout comprises one or more sgRNAs targeting exon 9 of fIL6ST. In some embodiments, the CRISPR gene-editing system for the treatment of gout comprises one or more sgRNAs targeting exon 10 of fIL6ST. In some embodiments, the CRISPR gene-editing system for the treatment of gout comprises one or more sgRNAs targeting exon 11 of fIL6ST In some embodiments, the CRISPR gene-editing system for the treatment of gout comprises one or more sgRNAs targeting exon 12 of fIL6ST. In some embodiments, the CRISPR gene-editing system for the treatment of gout comprises one or more sgRNAs targeting exon 13 of fIL6ST. In some embodiments, the CRISPR gene-editing system for the treatment of gout comprises one or more sgRNAs targeting exon 14 of fIL6ST. In some embodiments, the CRISPR gene-editing system for the treatment of gout comprises one or more sgRNAs targeting exon 15 of fIL6ST. In some embodiments, the CRISPR gene-editing system for the treatment of gout comprises one or more sgRNAs targeting exon 16 of fIL6ST. In some embodiments, the CRISPR gene-editing system for the treatment of gout comprises one or more sgRNAs targeting exon 17 of fIL6ST. In some embodiments, the CRISPR gene-editing system for the treatment of gout comprises one or more sgRNAs targeting exon 18 of fIL6ST. In some embodiments, the CRISPR gene-editing system for the treatment of gout comprises one or more sgRNAs targeting exon 19 of fIL6ST. In some embodiments, the CRISPR gene-editing system for the treatment of gout comprises one or more sgRNAs targeting exon 20 of fIL6ST.

[0316] In some embodiments, the CRISPR gene-editing system for the treatment of gout comprises one or more sgRNAs targeting TNFRSF1A. In some embodiments, the CRISPR gene-editing system for the treatment of gout comprises one or more sgRNAs targeting hTNFRSF1A. In some embodiments, the CRISPR gene-editing system for the treatment of gout comprises one or more sgRNAs targeting cTNFRSF1A. In some embodiments, the CRISPR gene-editing system for the treatment of gout comprises one or more sgRNAs targeting eTNFRSF1A. In some embodiments, the CRISPR gene-editing system for the treatment of gout comprises one or more sgRNAs targeting fTNFRSF1A.

[0317] In some embodiments, the CRISPR gene-editing system for the treatment of gout comprises one or more sgRNAs targeting exon 1 of hTNFRSF1A. In some embodiments, the CRISPR gene-editing system for the treatment of gout comprises one or more sgRNAs targeting exon 2 of hTNFRSF1A. In some embodiments, the CRISPR gene-editing system for the treatment of gout comprises one or more sgRNAs targeting exon 3 of hTNFRSF1A. In some embodiments, the CRISPR gene-editing system for the treatment of gout comprises one or more sgRNAs targeting exon 4 of hTNFRSF1A. In some embodiments, the CRISPR gene-editing system for the treatment of gout comprises one or more sgRNAs targeting exon 5 of hTNFRSF1A. In some embodiments, the CRISPR gene-editing system for the treatment of gout comprises one or more sgRNAs targeting exon 6 of hTNFRSF1A. In some embodiments, the CRISPR gene-editing system for the treatment of gout comprises one or more sgRNAs targeting exon 7 of hTNFRSF1A. In some embodiments, the CRISPR gene-editing system for the treatment of gout comprises one or more sgRNAs targeting exon 8 of hTNFRSF1A. In some embodiments, the CRISPR gene-editing system for the treatment of gout comprises one or more sgRNAs targeting exon 9 of hTNFRSF1A. In some embodiments, the CRISPR gene-editing system for the treatment of gout comprises one or more sgRNAs targeting exon 10 of hTNFRSF1A. In some embodiments, the CRISPR gene-editing system for the treatment of gout comprises one or more sgRNAs targeting exon 11 of hTNFRSF1A.

[0318] In some embodiments, the CRISPR gene-editing system for the treatment of gout comprises one or more sgRNAs targeting exon 1 of cTNFRSF1A. In some embodiments, the CRISPR gene-editing system for the treatment of gout comprises one or more sgRNAs targeting exon 2 of cTNFRSF1A. In some embodiments, the CRISPR gene-editing system for the treatment of gout comprises one or more sgRNAs targeting exon 3 of cTNFRSF1A. In some embodiments, the CRISPR gene-editing system for the treatment of gout comprises one or more sgRNAs targeting exon 4 of cTNFRSF1A. In some embodiments, the CRISPR gene-editing system for the treatment of gout comprises one or more sgRNAs targeting exon 5 of cTNFRSF1A. In some embodiments, the CRISPR gene-editing system for the treatment of gout comprises one or more sgRNAs targeting exon 6 of cTNFRSF1A. In some embodiments, the CRISPR gene-editing system for the treatment of gout comprises one or more sgRNAs targeting exon 7 of cTNFRSF1A. In some embodiments, the CRISPR gene-editing system for the treatment of gout comprises one or more sgRNAs targeting exon 8 of cTNFRSF1A. In some embodiments, the CRISPR gene-editing system for the treatment of gout comprises one or more sgRNAs targeting exon 9 of cTNFRSF1A. In some embodiments, the CRISPR gene-editing system for the treatment of gout comprises one or more sgRNAs targeting exon 10 of cTNFRSF1A. In some embodiments, the CRISPR gene-editing system for the treatment of gout comprises one or more sgRNAs targeting exon 11 of cTNFRSF1A.

[0319] In some embodiments, the CRISPR gene-editing system for the treatment of gout comprises one or more sgRNAs targeting exon 1 of eTNFRSF1A. In some embodiments, the CRISPR gene-editing system for the treatment of gout comprises one or more sgRNAs targeting exon 2 of eTNFRSF1A. In some embodiments, the CRISPR gene-editing system for the treatment of gout comprises one or more sgRNAs targeting exon 3 of eTNFRSF1A. In some embodiments, the CRISPR gene-editing system for the treatment of gout comprises one or more sgRNAs targeting exon 4 of eTNFRSF1A. In some embodiments, the CRISPR gene-editing system for the treatment of gout comprises one or more sgRNAs targeting exon 5 of eTNFRSF1A. In some embodiments, the CRISPR gene-editing system for the treatment of gout comprises one or more sgRNAs targeting exon 6 of eTNFRSF1A. In some embodiments, the CRISPR gene-editing system for the treatment of gout comprises one or more sgRNAs targeting exon 7 of eTNFRSF1A. In some embodiments, the CRISPR gene-editing system for the treatment of gout comprises one or more sgRNAs targeting exon 8 of eTNFRSF1A. In some embodiments, the CRISPR gene-editing system for the treatment of gout comprises one or more sgRNAs targeting exon 9 of eTNFRSF1A. In some embodiments, the CRISPR gene-editing system for the treatment of gout comprises one or more sgRNAs targeting exon 10 of eTNFRSF1A.

[0320] In some embodiments, the CRISPR gene-editing system for the treatment of gout comprises one or more sgRNAs targeting exon 1 of fTNFRSF1A. In some embodiments, the CRISPR gene-editing system for the treatment of gout comprises one or more sgRNAs targeting exon 2 of fTNFRSF1A. In some embodiments, the CRISPR gene-editing system for the treatment of gout comprises one or more sgRNAs targeting exon 3 of fTNFRSF1A. In some embodiments, the CRISPR gene-editing system for the treatment of gout comprises one or more sgRNAs targeting exon 4 of fINFRSF1A. In some embodiments, the CRISPR gene-editing system for the treatment of gout comprises one or more sgRNAs targeting exon 5 of fTNFRSF1A. In some embodiments, the CRISPR gene-editing system for the treatment of gout comprises one or more sgRNAs targeting exon 6 of fTNFRSF1A. In some embodiments, the CRISPR gene-editing system for the treatment of gout comprises one or more sgRNAs targeting exon 7 of fTNFRSF1A. In some embodiments, the CRISPR gene-editing system for the treatment of gout comprises one or more sgRNAs targeting exon 8 of fTNFRSF1A. In some embodiments, the CRISPR gene-editing system for the treatment of gout comprises one or more sgRNAs targeting exon 9 of fTNFRSF1A. In some embodiments, the CRISPR gene-editing system for the treatment of gout comprises one or more sgRNAs targeting exon 10 of fTNFRSF1A.

[0321] In some embodiments, the CRISPR gene-editing system for the treatment of gout comprises one or more sgRNAs targeting TNFRSF1B. In some embodiments, the CRISPR gene-editing system for the treatment of gout comprises one or more sgRNAs targeting hTNFRSF1B. In some embodiments, the CRISPR gene-editing system for the treatment of gout comprises one or more sgRNAs targeting cTNFRSF1B. In some embodiments, the CRISPR gene-editing system for the treatment of gout comprises one or more sgRNAs targeting eTNFRSF1B. In some embodiments, the CRISPR gene-editing system for the treatment of gout comprises one or more sgRNAs targeting fTNFRSF1B.

[0322] In some embodiments, the CRISPR gene-editing system for the treatment of gout comprises one or more sgRNAs targeting exon 1 of hTNFRSF1B. In some embodiments, the CRISPR gene-editing system for the treatment of gout comprises one or more sgRNAs targeting exon 2 of hTNFRSF1B. In some embodiments, the CRISPR gene-editing system for the treatment of gout comprises one or more sgRNAs targeting exon 3 of hTNFRSF1B. In some embodiments, the CRISPR gene-editing system for the treatment of gout comprises one or more sgRNAs targeting exon 4 of hTNFRSF1B. In some embodiments, the CRISPR gene-editing system for the treatment of gout comprises one or more sgRNAs targeting exon 5 of hTNFRSF1B. In some embodiments, the CRISPR gene-editing system for the treatment of gout comprises one or more sgRNAs targeting exon 6 of hTNFRSF1B. In some embodiments, the CRISPR gene-editing system for the treatment of gout comprises one or more sgRNAs targeting exon 7 of hTNFRSF1B. In some embodiments, the CRISPR gene-editing system for the treatment of gout comprises one or more sgRNAs targeting exon 8 of hTNFRSF1B. In some embodiments, the CRISPR gene-editing system for the treatment of gout comprises one or more sgRNAs targeting exon 9 of hTNFRSF1B. In some embodiments, the CRISPR gene-editing system for the treatment of gout comprises one or more sgRNAs targeting exon 10 of hTNFRSF1B. In some embodiments, the CRISPR gene-editing system for the treatment of gout comprises one or more sgRNAs targeting exon 11 of hTNFRSF1B In some embodiments, the CRISPR gene-editing system for the treatment of gout comprises one or more sgRNAs targeting exon 12 of hTNFRSF1B. In some embodiments, the CRISPR gene-editing system for the treatment of gout comprises one or more sgRNAs targeting exon 13 of hTNFRSF1B.

[0323] In some embodiments, the CRISPR gene-editing system for the treatment of gout comprises one or more sgRNAs targeting exon 1 of cTNFRSF1B. In some embodiments, the CRISPR gene-editing system for the treatment of gout comprises one or more sgRNAs targeting exon 2 of cTNFRSF1B. In some embodiments, the CRISPR gene-editing system for the treatment of gout comprises one or more sgRNAs targeting exon 3 of cTNFRSF1B. In some embodiments, the CRISPR gene-editing system for the treatment of gout comprises one or more sgRNAs targeting exon 4 of cTNFRSF1B. In some embodiments, the CRISPR gene-editing system for the treatment of gout comprises one or more sgRNAs targeting exon 5 of cTNFRSF1B. In some embodiments, the CRISPR gene-editing system for the treatment of gout comprises one or more sgRNAs targeting exon 6 of cTNFRSF1B. In some embodiments, the CRISPR gene-editing system for the treatment of gout comprises one or more sgRNAs targeting exon 7 of cTNFRSF1B. In some embodiments, the CRISPR gene-editing system for the treatment of gout comprises one or more sgRNAs targeting exon 8 of cTNFRSF1B. In some embodiments, the CRISPR gene-editing system for the treatment of gout comprises one or more sgRNAs targeting exon 9 of cTNFRSF1B. In some embodiments, the CRISPR gene-editing system for the treatment of gout comprises one or more sgRNAs targeting exon 10 of cTNFRSF1B. In some embodiments, the CRISPR gene-editing system for the treatment of gout comprises one or more sgRNAs targeting exon 11 of cTNFRSF1B.

[0324] In some embodiments, the CRISPR gene-editing system for the treatment of gout comprises one or more sgRNAs targeting exon 1 of eTNFRSF1B. In some embodiments, the CRISPR gene-editing system for the treatment of gout comprises one or more sgRNAs targeting exon 2 of eTNFRSF1B. In some embodiments, the CRISPR gene-editing system for the treatment of gout comprises one or more sgRNAs targeting exon 3 of eTNFRSF1B. In some embodiments, the CRISPR gene-editing system for the treatment of gout comprises one or more sgRNAs targeting exon 4 of eTNFRSF1B. In some embodiments, the CRISPR gene-editing system for the treatment of gout comprises one or more sgRNAs targeting exon 5 of eTNFRSF1B. In some embodiments, the CRISPR gene-editing system for the treatment of gout comprises one or more sgRNAs targeting exon 6 of eTNFRSF1B. In some embodiments, the CRISPR gene-editing system for the treatment of gout comprises one or more sgRNAs targeting exon 7 of eTNFRSF1B. In some embodiments, the CRISPR gene-editing system for the treatment of gout comprises one or more sgRNAs targeting exon 8 of eTNFRSF1B. In some embodiments, the CRISPR gene-editing system for the treatment of gout comprises one or more sgRNAs targeting exon 9 of eTNFRSF1B. In some embodiments, the CRISPR gene-editing system for the treatment of gout comprises one or more sgRNAs targeting exon 10 of eTNFRSF1B. In some embodiments, the CRISPR gene-editing system for the treatment of gout comprises one or more sgRNAs targeting exon 11 of eTNFRSF1B.

[0325] In some embodiments, the CRISPR gene-editing system for the treatment of gout comprises one or more sgRNAs targeting exon 1 of fTNFRSF1B. In some embodiments, the CRISPR gene-editing system for the treatment of gout comprises one or more sgRNAs targeting exon 2 of fTNFRSF1B. In some embodiments, the CRISPR gene-editing system for the treatment of gout comprises one or more sgRNAs targeting exon 3 of fTNFRSF1B. In some embodiments, the CRISPR gene-editing system for the treatment of gout comprises one or more sgRNAs targeting exon 4 of fTNFRSF1B. In some embodiments, the CRISPR gene-editing system for the treatment of gout comprises one or more sgRNAs targeting exon 5 of fTNFRSF1B. In some embodiments, the CRISPR gene-editing system for the treatment of gout comprises one or more sgRNAs targeting exon 6 of fTNFRSF1B. In some embodiments, the CRISPR gene-editing system for the treatment of gout comprises one or more sgRNAs targeting exon 7 of fTNFRSF1B. In some embodiments, the CRISPR gene-editing system for the treatment of gout comprises one or more sgRNAs targeting exon 8 of fTNFRSF1B. In some embodiments, the CRISPR gene-editing system for the treatment of gout comprises one or more sgRNAs targeting exon 9 of fTNFRSF1B. In some embodiments, the CRISPR gene-editing system for the treatment of gout comprises one or more sgRNAs targeting exon 10 of fTNFRSF1B.

[0326] In some embodiments, the CRISPR gene-editing system for the treatment of gout comprises one or more sgRNAs targeting TNFRSF3. In some embodiments, the CRISPR gene-editing system for the treatment of gout comprises one or more sgRNAs targeting hTNFRSF3. In some embodiments, the CRISPR gene-editing system for the treatment of gout comprises one or more sgRNAs targeting cTNFRSF3. In some embodiments, the CRISPR gene-editing system for the treatment of gout comprises one or more sgRNAs targeting eTNFRSF3. In some embodiments, the CRISPR gene-editing system for the treatment of gout comprises one or more sgRNAs targeting fTNFRSF3.

[0327] In some embodiments, the CRISPR gene-editing system for the treatment of gout comprises one or more sgRNAs targeting exon 1 of hTNFRSF3. In some embodiments, the CRISPR gene-editing system for the treatment of gout comprises one or more sgRNAs targeting exon 2 of hTNFRSF3. In some embodiments, the CRISPR gene-editing system for the treatment of gout comprises one or more sgRNAs targeting exon 3 of hTNFRSF3. In some embodiments, the CRISPR gene-editing system for the treatment of gout comprises one or more sgRNAs targeting exon 4 of hTNFRSF3. In some embodiments, the CRISPR gene-editing system for the treatment of gout comprises one or more sgRNAs targeting exon 5 of hTNFRSF3. In some embodiments, the CRISPR gene-editing system for the treatment of gout comprises one or more sgRNAs targeting exon 6 of hTNFRSF3. In some embodiments, the CRISPR gene-editing system for the treatment of gout comprises one or more sgRNAs targeting exon 7 of hTNFRSF3. In some embodiments, the CRISPR gene-editing system for the treatment of gout comprises one or more sgRNAs targeting exon 8 of hTNFRSF3. In some embodiments, the CRISPR gene-editing system for the treatment of gout comprises one or more sgRNAs targeting exon 9 of hTNFRSF3. In some embodiments, the CRISPR gene-editing system for the treatment of gout comprises one or more sgRNAs targeting exon 10 of hTNFRSF3. In some embodiments, the CRISPR gene-editing system for the treatment of gout comprises one or more sgRNAs targeting exon 11 of hTNFRSF3. In some embodiments, the CRISPR gene-editing system for the treatment of gout comprises one or more sgRNAs targeting exon 12 of hTNFRSF3.

[0328] In some embodiments, the CRISPR gene-editing system for the treatment of gout comprises one or more sgRNAs targeting exon 1 of cTNFRSF3. In some embodiments, the CRISPR gene-editing system for the treatment of gout comprises one or more sgRNAs targeting exon 2 of cTNFRSF3. In some embodiments, the CRISPR gene-editing system for the treatment of gout comprises one or more sgRNAs targeting exon 3 of cTNFRSF3. In some embodiments, the CRISPR gene-editing system for the treatment of gout comprises one or more sgRNAs targeting exon 4 of cTNFRSF3. In some embodiments, the CRISPR gene-editing system for the treatment of gout comprises one or more sgRNAs targeting exon 5 of cTNFRSF3. In some embodiments, the CRISPR gene-editing system for the treatment of gout comprises one or more sgRNAs targeting exon 6 of cTNFRSF3. In some embodiments, the CRISPR gene-editing system for the treatment of gout comprises one or more sgRNAs targeting exon 7 of cTNFRSF3. In some embodiments, the CRISPR gene-editing system for the treatment of gout comprises one or more sgRNAs targeting exon 8 of cTNFRSF3. In some embodiments, the CRISPR gene-editing system for the treatment of gout comprises one or more sgRNAs targeting exon 9 of cTNFRSF3. In some embodiments, the CRISPR gene-editing system for the treatment of gout comprises one or more sgRNAs targeting exon 10 of cTNFRSF3.

[0329] In some embodiments, the CRISPR gene-editing system for the treatment of gout comprises one or more sgRNAs targeting exon 1 of eTNFRSF3. In some embodiments, the CRISPR gene-editing system for the treatment of gout comprises one or more sgRNAs targeting exon 2 of eTNFRSF3. In some embodiments, the CRISPR gene-editing system for the treatment of gout comprises one or more sgRNAs targeting exon 3 of eTNFRSF3. In some embodiments, the CRISPR gene-editing system for the treatment of gout comprises one or more sgRNAs targeting exon 4 of eTNFRSF3. In some embodiments, the CRISPR gene-editing system for the treatment of gout comprises one or more sgRNAs targeting exon 5 of eTNFRSF3. In some embodiments, the CRISPR gene-editing system for the treatment of gout comprises one or more sgRNAs targeting exon 6 of eTNFRSF3. In some embodiments, the CRISPR gene-editing system for the treatment of gout comprises one or more sgRNAs targeting exon 7 of eTNFRSF3. In some embodiments, the CRISPR gene-editing system for the treatment of gout comprises one or more sgRNAs targeting exon 8 of eTNFRSF3. In some embodiments, the CRISPR gene-editing system for the treatment of gout comprises one or more sgRNAs targeting exon 9 of eTNFRSF3. In some embodiments, the CRISPR gene-editing system for the treatment of gout comprises one or more sgRNAs targeting exon 10 of eTNFRSF3.

[0330] In some embodiments, the CRISPR gene-editing system for the treatment of gout comprises one or more sgRNAs targeting exon 1 of fTNFRSF3. In some embodiments, the CRISPR gene-editing system for the treatment of gout comprises one or more sgRNAs targeting exon 2 of fTNFRSF3. In some embodiments, the CRISPR gene-editing system for the treatment of gout comprises one or more sgRNAs targeting exon 3 of fTNFRSF3. In some embodiments, the CRISPR gene-editing system for the treatment of gout comprises one or more sgRNAs targeting exon 4 of fTNFRSF3. In some embodiments, the CRISPR gene-editing system for the treatment of gout comprises one or more sgRNAs targeting exon 5 of fTNFRSF3. In some embodiments, the CRISPR gene-editing system for the treatment of gout comprises one or more sgRNAs targeting exon 6 of fTNFRSF3. In some embodiments, the CRISPR gene-editing system for the treatment of gout comprises one or more sgRNAs targeting exon 7 of fTNFRSF3. In some embodiments, the CRISPR gene-editing system for the treatment of gout comprises one or more sgRNAs targeting exon 8 of fTNFRSF3. In some embodiments, the CRISPR gene-editing system for the treatment of gout comprises one or more sgRNAs targeting exon 9 of fTNFRSF3. In some embodiments, the CRISPR gene-editing system for the treatment of gout comprises one or more sgRNAs targeting exon 10 of fTNFRSF3.

[0331] In some embodiments, the CRISPR gene-editing system for the treatment of gout comprises one or more sgRNAs targeting TNFRSF4. In some embodiments, the CRISPR gene-editing system for the treatment of gout comprises one or more sgRNAs targeting hTNFRSF4. In some embodiments, the CRISPR gene-editing system for the treatment of gout comprises one or more sgRNAs targeting cTNFRSF4. In some embodiments, the CRISPR gene-editing system for the treatment of gout comprises one or more sgRNAs targeting eTNFRSF4. In some embodiments, the CRISPR gene-editing system for the treatment of gout comprises one or more sgRNAs targeting fTNFRSF4.

[0332] In some embodiments, the CRISPR gene-editing system for the treatment of gout comprises one or more sgRNAs targeting exon 1 of hTNFRSF4. In some embodiments, the CRISPR gene-editing system for the treatment of gout comprises one or more sgRNAs targeting exon 2 of hTNFRSF4. In some embodiments, the CRISPR gene-editing system for the treatment of gout comprises one or more sgRNAs targeting exon 3 of hTNFRSF4. In some embodiments, the CRISPR gene-editing system for the treatment of gout comprises one or more sgRNAs targeting exon 4 of hTNFRSF4. In some embodiments, the CRISPR gene-editing system for the treatment of gout comprises one or more sgRNAs targeting exon 5 of hTNFRSF4. In some embodiments, the CRISPR gene-editing system for the treatment of gout comprises one or more sgRNAs targeting exon 6 of hTNFRSF4.

[0333] In some embodiments, the CRISPR gene-editing system for the treatment of gout comprises one or more sgRNAs targeting exon 1 of cTNFRSF4. In some embodiments, the CRISPR gene-editing system for the treatment of gout comprises one or more sgRNAs targeting exon 2 of cTNFRSF4. In some embodiments, the CRISPR gene-editing system for the treatment of gout comprises one or more sgRNAs targeting exon 3 of cTNFRSF4. In some embodiments, the CRISPR gene-editing system for the treatment of gout comprises one or more sgRNAs targeting exon 4 of cTNFRSF4. In some embodiments, the CRISPR gene-editing system for the treatment of gout comprises one or more sgRNAs targeting exon 5 of cTNFRSF4. In some embodiments, the CRISPR gene-editing system for the treatment of gout comprises one or more sgRNAs targeting exon 6 of cTNFRSF4. In some embodiments, the CRISPR gene-editing system for the treatment of gout comprises one or more sgRNAs targeting exon 7 of cTNFRSF4.

[0334] In some embodiments, the CRISPR gene-editing system for the treatment of gout comprises one or more sgRNAs targeting exon 1 of eTNFRSF4. In some embodiments, the CRISPR gene-editing system for the treatment of gout comprises one or more sgRNAs targeting exon 2 of eTNFRSF4. In some embodiments, the CRISPR gene-editing system for the treatment of gout comprises one or more sgRNAs targeting exon 3 of eTNFRSF4. In some embodiments, the CRISPR gene-editing system for the treatment of gout comprises one or more sgRNAs targeting exon 4 of eTNFRSF4. In some embodiments, the CRISPR gene-editing system for the treatment of gout comprises one or more sgRNAs targeting exon 5 of eTNFRSF4. In some embodiments, the CRISPR gene-editing system for the treatment of gout comprises one or more sgRNAs targeting exon 6 of eTNFRSF4. In some embodiments, the CRISPR gene-editing system for the treatment of gout comprises one or more sgRNAs targeting exon 7 of eTNFRSF4.

[0335] In some embodiments, the CRISPR gene-editing system for the treatment of gout comprises one or more sgRNAs targeting exon 1 of fTNFRSF4. In some embodiments, the CRISPR gene-editing system for the treatment of gout comprises one or more sgRNAs targeting exon 2 of fTNFRSF4. In some embodiments, the CRISPR gene-editing system for the treatment of gout comprises one or more sgRNAs targeting exon 3 of fTNFRSF4. In some embodiments, the CRISPR gene-editing system for the treatment of gout comprises one or more sgRNAs targeting exon 4 of fTNFRSF4. In some embodiments, the CRISPR gene-editing system for the treatment of gout comprises one or more sgRNAs targeting exon 5 of fTNFRSF4. In some embodiments, the CRISPR gene-editing system for the treatment of gout comprises one or more sgRNAs targeting exon 6 of fTNFRSF4. In some embodiments, the CRISPR gene-editing system for the treatment of gout comprises one or more sgRNAs targeting exon 7 of fTNFRSF4.

[0336] In some embodiments, the CRISPR gene-editing system for the treatment of gout comprises one or more sgRNAs targeting TNFRSF11A. In some embodiments, the CRISPR gene-editing system for the treatment of gout comprises one or more sgRNAs targeting hTNFRSF11A. In some embodiments, the CRISPR gene-editing system for the treatment of gout comprises one or more sgRNAs targeting cTNFRSF11A. In some embodiments, the CRISPR gene-editing system for the treatment of gout comprises one or more sgRNAs targeting eTNFRSF11A. In some embodiments, the CRISPR gene-editing system for the treatment of gout comprises one or more sgRNAs targeting fTNFRSF11A.

[0337] In some embodiments, the CRISPR gene-editing system for the treatment of gout comprises one or more sgRNAs targeting exon 1 of hTNFRSF11A. In some embodiments, the CRISPR gene-editing system for the treatment of gout comprises one or more sgRNAs targeting exon 2 of hTNFRSF11A. In some embodiments, the CRISPR gene-editing system for the treatment of gout comprises one or more sgRNAs targeting exon 3 of hTNFRSF11A. In some embodiments, the CRISPR gene-editing system for the treatment of gout comprises one or more sgRNAs targeting exon 4 of hTNFRSF11A. In some embodiments, the CRISPR gene-editing system for the treatment of gout comprises one or more sgRNAs targeting exon 5 of hTNFRSF11A. In some embodiments, the CRISPR gene-editing system for the treatment of gout comprises one or more sgRNAs targeting exon 6 of hTNFRSF11A. In some embodiments, the CRISPR gene-editing system for the treatment of gout comprises one or more sgRNAs targeting exon 7 of hTNFRSF11A. In some embodiments, the CRISPR gene-editing system for the treatment of gout comprises one or more sgRNAs targeting exon 8 of hTNFRSF11A. In some embodiments, the CRISPR gene-editing system for the treatment of gout comprises one or more sgRNAs targeting exon 9 of hTNFRSF11A. In some embodiments, the CRISPR gene-editing system for the treatment of gout comprises one or more sgRNAs targeting exon 10 of hTNFRSF11A. In some embodiments, the CRISPR gene-editing system for the treatment of gout comprises one or more sgRNAs targeting exon 11 of hTNFRSF11A. In some embodiments, the CRISPR gene-editing system for the treatment of gout comprises one or more sgRNAs targeting exon 12 of hTNFRSF11A.

[0338] In some embodiments, the CRISPR gene-editing system for the treatment of gout comprises one or more sgRNAs targeting exon 1 of cTNFRSF11A. In some embodiments, the CRISPR gene-editing system for the treatment of gout comprises one or more sgRNAs targeting exon 2 of cTNFRSF11A. In some embodiments, the CRISPR gene-editing system for the treatment of gout comprises one or more sgRNAs targeting exon 3 of cTNFRSF11A. In some embodiments, the CRISPR gene-editing system for the treatment of gout comprises one or more sgRNAs targeting exon 4 of cTNFRSF11A. In some embodiments, the CRISPR gene-editing system for the treatment of gout comprises one or more sgRNAs targeting exon 5 of cTNFRSF11A. In some embodiments, the CRISPR gene-editing system for the treatment of gout comprises one or more sgRNAs targeting exon 6 of cTNFRSF11A. In some embodiments, the CRISPR gene-editing system for the treatment of gout comprises one or more sgRNAs targeting exon 7 of cTNFRSF11A. In some embodiments, the CRISPR gene-editing system for the treatment of gout comprises one or more sgRNAs targeting exon 8 of cTNFRSF11A. In some embodiments, the CRISPR gene-editing system for the treatment of gout comprises one or more sgRNAs targeting exon 9 of cTNFRSF11A. In some embodiments, the CRISPR gene-editing system for the treatment of gout comprises one or more sgRNAs targeting exon 10 of cTNFRSF11A. In some embodiments, the CRISPR gene-editing system for the treatment of gout comprises one or more sgRNAs targeting exon 11 of cTNFRSF11A.

[0339] In some embodiments, the CRISPR gene-editing system for the treatment of gout comprises one or more sgRNAs targeting exon 1 of eTNFRSF11A. In some embodiments, the CRISPR gene-editing system for the treatment of gout comprises one or more sgRNAs targeting exon 2 of eTNFRSF11A. In some embodiments, the CRISPR gene-editing system for the treatment of gout comprises one or more sgRNAs targeting exon 3 of eTNFRSF11A. In some embodiments, the CRISPR gene-editing system for the treatment of gout comprises one or more sgRNAs targeting exon 4 of eTNFRSF11A. In some embodiments, the CRISPR gene-editing system for the treatment of gout comprises one or more sgRNAs targeting exon 5 of eTNFRSF11A. In some embodiments, the CRISPR gene-editing system for the treatment of gout comprises one or more sgRNAs targeting exon 6 of eTNFRSF11A. In some embodiments, the CRISPR gene-editing system for the treatment of gout comprises one or more sgRNAs targeting exon 7 of eTNFRSF11A. In some embodiments, the CRISPR gene-editing system for the treatment of gout comprises one or more sgRNAs targeting exon 8 of eTNFRSF11A. In some embodiments, the CRISPR gene-editing system for the treatment of gout comprises one or more sgRNAs targeting exon 9 of eTNFRSF11A. In some embodiments, the CRISPR gene-editing system for the treatment of gout comprises one or more sgRNAs targeting exon 10 of eTNFRSF11A.

[0340] In some embodiments, the CRISPR gene-editing system for the treatment of gout comprises one or more sgRNAs targeting exon 1 of fTNFRSF11A. In some embodiments, the CRISPR gene-editing system for the treatment of gout comprises one or more sgRNAs targeting exon 2 of fTNFRSF11A. In some embodiments, the CRISPR gene-editing system for the treatment of gout comprises one or more sgRNAs targeting exon 3 of fTNFRSF11A. In some embodiments, the CRISPR gene-editing system for the treatment of gout comprises one or more sgRNAs targeting exon 4 of fTNFRSF11A. In some embodiments, the CRISPR gene-editing system for the treatment of gout comprises one or more sgRNAs targeting exon 5 of fTNFRSF11A. In some embodiments, the CRISPR gene-editing system for the treatment of gout comprises one or more sgRNAs targeting exon 6 of fTNFRSF11A. In some embodiments, the CRISPR gene-editing system for the treatment of gout comprises one or more sgRNAs targeting exon 7 of fTNFRSF11A. In some embodiments, the CRISPR gene-editing system for the treatment of gout comprises one or more sgRNAs targeting exon 8 of fTNFRSF11A. In some embodiments, the CRISPR gene-editing system for the treatment of gout comprises one or more sgRNAs targeting exon 9 of fTNFRSF11A. In some embodiments, the CRISPR gene-editing system for the treatment of gout comprises one or more sgRNAs targeting exon 10 of fTNFRSF11A. In some embodiments, the CRISPR gene-editing system for the treatment of gout comprises one or more sgRNAs targeting exon 11 of fTNFRSF11A.

### V. Back or Spine Conditions or Disorders

### A. Introduction

[0341] Back or spine conditions or disorders, including low back pain, cervical pain, sacral pain, thoracic pain. and pain or inflammation associated with discogenic disorders e.g., degenerative disc disease (DDD) or internal disc disruption (IDD), are a major cause of morbidity and disability worldwide for which few long-term options for amelioration currently exist. Andersson GB. Epidemiological features of chronic low-back pain. Lancet. 1999; 354:581-585. Presently available treatments include surgical or less invasive options that often fail to offer long-term palliation. Ju, et al. Global Spine Journal (2020): 2192568220963058. All vertebrate species are affected by back or spine conditions or disorders, including working animals, domestic pets, and their owners. All suffer from the associated discomfort, pain, and disability, depending on the degree of disease progression.

[0342] Back or spine conditions or disorders, such as low back pain, are complex diseases characterized by a multitude of inputs contributing to a progressive course of disability. Among these contributors are morphological irregularities (e.g., disc disruptions), inflammation, changes in the localized cellular environment (e.g., vascularization and/or innervation) and degenerative changes. Peng, Bao-Gan. World Journal of Orthopedics 4.2 (2013): 42. Each contributing factor is driven by differential expression of various gene products, including at least pro-inflammatory cytokines, growth factors, pain signaling molecules, and other effector biomolecules. There is a pressing need for new methods and compositions to treat this spectrum of disease and its associated disability.

[0343] The present disclosure provides compositions and methods for back or spine conditions or disorders. Particularly, said conditions are treated by reducing pro-inflammatory signaling mediated by inflammatory cytokines, such as, IL1α, IL1β, TNF-α, IL6, IL8, IL18, IL33, matrix metalloproteinases (MMPs), or TGFB1, or TGFB2, binding to their cognate receptor(s). In some embodiments, such conditions or disorders include disorders of the intervertebral discs (IVDs). In some embodiments, the condition or disorder is DDD. In some embodiments, the condition or disorder is IDD. In some embodiments, the condition or disorder is low back pain.

[0344] Among the advantages of the present disclosure over treatments currently available for mammals afflicted with back or spine conditions or disorders include the period of relief from symptoms. Upon local administration (e.g., intradiscal injection) and subsequent genetic editing of a cell (e.g., a chondrocyte, a tenocyte, an osteocyte, a monocyte, a macrophage or the cells of the nucleus pulposus or annulus fibrosus), pro-inflammatory signaling is silenced through the targeted gene for the life of that cell. By contrast, biologic treatments require periodic dosing, which may magnify the impact of any side effects, which can be severe. Among various genetic approaches, the present disclosure is also superior due to the resistance to leakiness built in by virtue of modifying a protein receptor, rather than ablating its expression altogether.

### B. Low Back Pain

[0345] In one aspect, the present disclosure encompasses treatments for low back pain. In some embodiments, the low back pain treatment comprises a therapeutically effective amount of a Clustered Regularly Interspaced Short Palindromic Repeats (CRISPR) gene-editing system, the system comprising: (i) a CRISPR Associated (Cas) protein; and (ii) at least one guide RNA targeting IL1R1. In some embodiments, the low back pain treatment comprises a CRISPR gene-editing system targeting hIL1R1. In some embodiments, the low back pain treatment comprises a CRISPR gene-editing system targeting cIL1R1. In some embodiments, the low back pain treatment comprises a CRISP gene-editing system R targeting eIL1R1. In some embodiments, the low back pain treatment comprises a CRISPR gene-editing system targeting fIL1R1.

[0346] In some embodiments, the CRISPR gene-editing system for the treatment of low back pain comprises one or more sgRNAs targeting exon 1 of hIL1R1. In some embodiments, the CRISPR gene-editing system for the treatment of low back pain comprises one or more sgRNAs targeting exon 2 of hIL1R1. In some embodiments, the CRISPR gene-editing system for the treatment of low back pain comprises one or more sgRNAs targeting exon 3 of hIL1R1. In some embodiments, the CRISPR gene-editing system for the treatment of low back pain comprises one or more sgRNAs targeting exon 4 of hIL1R1. In some embodiments, the CRISPR gene-editing system for the treatment of low back pain comprises one or more sgRNAs targeting exon 5 of hIL1R1. In some embodiments, the CRISPR gene-editing system for the treatment of low back pain comprises one or more sgRNAs targeting exon 6 of hIL1R1. In some embodiments, the CRISPR gene-editing system for the treatment of low back pain comprises one or more sgRNAs targeting exon 7 of hIL1R1. In some embodiments, the CRISPR gene-editing system for the treatment of low back pain comprises one or more sgRNAs targeting exon 8 of hIL1R1. In some embodiments, the CRISPR gene-editing system for the treatment of low back pain comprises one or more sgRNAs targeting exon 9 of hIL1R1. In some embodiments, the CRISPR gene-editing system for the treatment of low back pain comprises one or more sgRNAs targeting exon 10 of hIL1R1. In some embodiments, the CRISPR gene-editing system for the treatment of low back pain comprises one or more sgRNAs targeting exon 11 of hIL1R1. In some embodiments, the CRISPR gene-editing system for the treatment of low back pain comprises one or more sgRNAs targeting exon 12 of hIL1R1. In some embodiments, the CRISPR gene-editing system for the treatment of low back pain comprises one or more sgRNAs targeting exon 13 of hIL1R1. In some embodiments, the CRISPR gene-editing system for the treatment of low back pain comprises one or more sgRNAs targeting exon 14 of hIL1R1. In some embodiments, the CRISPR gene-editing system for the treatment of low back pain comprises one or more sgRNAs targeting exon 15 of hIL1R1. In some embodiments, the CRISPR gene-editing system for the treatment of low back pain comprises one or more sgRNAs targeting exon 16 of hIL1R1. In some embodiments, the CRISPR gene-editing system for the treatment of low back pain comprises one or more sgRNAs targeting exon 17 of hIL1R1. In some embodiments, the CRISPR gene-editing system for the treatment of low back pain comprises one or more sgRNAs targeting exon 18 of hIL1R1. In some embodiments, the CRISPR gene-editing system for the treatment of low back pain comprises one or more sgRNAs targeting exon 19 of hIL1R1. In some embodiments, the CRISPR gene-editing system for the treatment of low back pain comprises one or more sgRNAs targeting exon 20 of hIL1R1. In some embodiments, the CRISPR gene-editing system for the treatment of low back pain comprises one or more sgRNAs targeting exon 21 of hIL1R1.

[0347] In some embodiments, the CRISPR gene-editing system for the treatment of low back pain comprises one or more sgRNAs targeting exon 1 of cIL1R1. In some embodiments, the CRISPR gene-editing system for the treatment of low back pain comprises one or more sgRNAs targeting exon 2 of cIL1R1. In some embodiments, the CRISPR gene-editing system for the treatment of low back pain comprises one or more sgRNAs targeting exon 3 of cIL1R1. In some embodiments, the CRISPR gene-editing system for the treatment of low back pain comprises one or more sgRNAs targeting exon 4 of cIL1R1. In some embodiments, the CRISPR gene-editing system for the treatment of low back pain comprises one or more sgRNAs targeting exon 5 of cIL1R1. In some embodiments, the CRISPR gene-editing system for the treatment of low back pain comprises one or more sgRNAs targeting exon 6 of cIL1R1. In some embodiments, the CRISPR gene-editing system for the treatment of low back pain comprises one or more sgRNAs targeting exon 7 of cIL1R1. In some embodiments, the CRISPR gene-editing system for the treatment of low back pain comprises one or more sgRNAs targeting exon 8 of cIL1R1. In some embodiments, the CRISPR gene-editing system for the treatment of low back pain comprises one or more sgRNAs targeting exon 9 of cIL1R1. In some embodiments, the CRISPR gene-editing system for the treatment of low back pain comprises one or more sgRNAs targeting exon 10 of cIL1R1. In some embodiments, the CRISPR gene-editing system for the treatment of low back pain comprises one or more sgRNAs targeting exon 11 of cIL1R1. In some embodiments, the CRISPR gene-editing system for the treatment of low back pain comprises one or more sgRNAs targeting exon 12 of cIL1R1. In some embodiments, the CRISPR gene-editing system for the treatment of low back pain comprises one or more sgRNAs targeting exon 13 of cIL1R1. In some embodiments, the CRISPR gene-editing system for the treatment of low back pain comprises one or more sgRNAs targeting exon 14 of cIL1R1. In some embodiments, the CRISPR gene-editing system for the treatment of low back pain comprises one or more sgRNAs targeting exon 15 of cIL1R1. In some embodiments, the CRISPR gene-editing system for the treatment of low back pain comprises one or more sgRNAs targeting exon 16 of cIL1R1.

[0348] In some embodiments, the CRISPR gene-editing system for the treatment of low back pain comprises one or more sgRNAs targeting exon 1 of eIL1R1. In some embodiments, the CRISPR gene-editing system for the treatment of low back pain comprises one or more sgRNAs targeting exon 2 of eIL1R1. In some embodiments, the CRISPR gene-editing system for the treatment of low back pain comprises one or more sgRNAs targeting exon 3 of eIL1R1. In some embodiments, the CRISPR gene-editing system for the treatment of low back pain comprises one or more sgRNAs targeting exon 4 of eIL1R1. In some embodiments, the CRISPR gene-editing system for the treatment of low back pain comprises one or more sgRNAs targeting exon 5 of eIL1R1. In some embodiments, the CRISPR gene-editing system for the treatment of low back pain comprises one or more sgRNAs targeting exon 6 of eIL1R1. In some embodiments, the CRISPR gene-editing system for the treatment of low back pain comprises one or more sgRNAs targeting exon 7 of eIL1R1. In some embodiments, the CRISPR gene-editing system for the treatment of low back pain comprises one or more sgRNAs targeting exon 8 of eIL1R1. In some embodiments, the CRISPR gene-editing system for the treatment of low back pain comprises one or more sgRNAs targeting exon 9 of eIL1R1. In some embodiments, the CRISPR gene-editing system for the treatment of low back pain comprises one or more sgRNAs targeting exon 10 of eIL1R1. In some embodiments, the CRISPR gene-editing system for the treatment of low back pain comprises one or more sgRNAs targeting exon 11 of eIL1R1. In some embodiments, the CRISPR gene-editing system for the treatment of low back pain comprises one or more sgRNAs targeting exon 12 of eIL1R1. In some embodiments, the CRISPR gene-editing system for the treatment of low back pain comprises one or more sgRNAs targeting exon 13 of eIL1R1. In some embodiments, the CRISPR gene-editing system for the treatment of low back pain comprises one or more sgRNAs targeting exon 14 of eIL1R1. In some embodiments, the CRISPR gene-editing system for the treatment of low back pain comprises one or more sgRNAs targeting exon 15 of eIL1R1.

[0349] In some embodiments, the CRISPR gene-editing system for the treatment of low back pain comprises one or more sgRNAs targeting exon 1 of fIL1R1. In some embodiments, the CRISPR gene-editing system for the treatment of low back pain comprises one or more sgRNAs targeting exon 2 of fIL1R1. In some embodiments, the CRISPR gene-editing system for the treatment of low back pain comprises one or more sgRNAs targeting exon 3 of fIL1R1. In some embodiments, the CRISPR gene-editing system for the treatment of low back pain comprises one or more sgRNAs targeting exon 4 of fIL1R1. In some embodiments, the CRISPR gene-editing system for the treatment of low back pain comprises one or more sgRNAs targeting exon 5 of fIL1R1. In some embodiments, the CRISPR gene-editing system for the treatment of low back pain comprises one or more sgRNAs targeting exon 6 of fIL1R1. In some embodiments, the CRISPR gene-editing system for the treatment of low back pain comprises one or more sgRNAs targeting exon 7 of fIL1R1. In some embodiments, the CRISPR gene-editing system for the treatment of low back pain comprises one or more sgRNAs targeting exon 8 of fIL1R1. In some embodiments, the CRISPR gene-editing system for the treatment of low back pain comprises one or more sgRNAs targeting exon 9 of fIL1R1. In some embodiments, the CRISPR gene-editing system for the treatment of low back pain comprises one or more sgRNAs targeting exon 10 of fIL1R1. In some embodiments, the CRISPR gene-editing system for the treatment of low back pain comprises one or more sgRNAs targeting exon 11 of fIL1R1. In some embodiments, the CRISPR gene-editing system for the treatment of low back pain comprises one or more sgRNAs targeting exon 12 of fIL1R1. In some embodiments, the CRISPR gene-editing system for the treatment of low back pain comprises one or more sgRNAs targeting exon 13 of fIL1R1. In some embodiments, the CRISPR gene-editing system for the treatment of low back pain comprises one or more sgRNAs targeting exon 14 of fIL1R1. In some embodiments, the CRISPR gene-editing system for the treatment of low back pain comprises one or more sgRNAs targeting exon 15 of fIL1R1. In some embodiments, the CRISPR gene-editing system for the treatment of low back pain comprises one or more sgRNAs targeting exon 16 of fIL1R1. In some embodiments, the CRISPR gene-editing system for the treatment of low back pain comprises one or more sgRNAs targeting exon 17 of fIL1R1. In some embodiments, the CRISPR gene-editing system for the treatment of low back pain comprises one or more sgRNAs targeting exon 18 of fIL1R1.

[0350] In some embodiments, the CRISPR gene-editing system for the treatment of low back pain comprises one or more sgRNAs targeting IL1RAP. In some embodiments, the CRISPR gene-editing system for the treatment of low back pain comprises one or more sgRNAs targeting hIL1RAP. In some embodiments, the CRISPR gene-editing system for the treatment of low back pain comprises one or more sgRNAs targeting cIL1RAP. In some embodiments, the CRISPR gene-editing system for the treatment of low back pain comprises one or more sgRNAs targeting eIL1RAP. In some embodiments, the CRISPR gene-editing system for the treatment of low back pain comprises one or more sgRNAs targeting fIL1RAP.

[0351] In some embodiments, the CRISPR gene-editing system for the treatment of low back pain comprises one or more sgRNAs targeting exon 1 of hIL1RAP. In some embodiments, the CRISPR gene-editing system for the treatment of low back pain comprises one or more sgRNAs targeting exon 2 of hIL1RAP. In some embodiments, the CRISPR gene-editing system for the treatment of low back pain comprises one or more sgRNAs targeting exon 3 of hIL1RAP. In some embodiments, the CRISPR gene-editing system for the treatment of low back pain comprises one or more sgRNAs targeting exon 4 of hIL1RAP. In some embodiments, the CRISPR gene-editing system for the treatment of low back pain comprises one or more sgRNAs targeting exon 5 of hIL1RAP. In some embodiments, the CRISPR gene-editing system for the treatment of low back pain comprises one or more sgRNAs targeting exon 6 of hIL1RAP. In some embodiments, the CRISPR gene-editing system for the treatment of low back pain comprises one or more sgRNAs targeting exon 7 of hIL1RAP. In some embodiments, the CRISPR gene-editing system for the treatment of low back pain comprises one or more sgRNAs targeting exon 8 of hIL1RAP. In some embodiments, the CRISPR gene-editing system for the treatment of low back pain comprises one or more sgRNAs targeting exon 9 of hIL1RAP. In some embodiments, the CRISPR gene-editing system for the treatment of low back pain comprises one or more sgRNAs targeting exon 10 of hIL1RAP. In some embodiments, the CRISPR gene-editing system for the treatment of low back pain comprises one or more sgRNAs targeting exon 11 of hIL1RAP. In some embodiments, the CRISPR gene-editing system for the treatment of low back pain comprises one or more sgRNAs targeting exon 12 of hIL1RAP. In some embodiments, the CRISPR gene-editing system for the treatment of low back pain comprises one or more sgRNAs targeting exon 13 of hIL1RAP. In some embodiments, the CRISPR gene-editing system for the treatment of low back pain comprises one or more sgRNAs targeting exon 14 of hIL1RAP. In some embodiments, the CRISPR gene-editing system for the treatment of low back pain comprises one or more sgRNAs targeting exon 15 of hIL1RAP. In some embodiments, the CRISPR gene-editing system for the treatment of low back pain comprises one or more sgRNAs targeting exon 16 of hIL1RAP. In some embodiments, the CRISPR gene-editing system for the treatment of low back pain comprises one or more sgRNAs targeting exon 17 of hIL1RAP.

[0352] In some embodiments, the CRISPR gene-editing system for the treatment of low back pain comprises one or more sgRNAs targeting exon 1 of cIL1RAP. In some embodiments, the CRISPR gene-editing system for the treatment of low back pain comprises one or more sgRNAs targeting exon 2 of cIL1RAP. In some embodiments, the CRISPR gene-editing system for the treatment of low back pain comprises one or more sgRNAs targeting exon 3 of cIL1RAP. In some embodiments, the CRISPR gene-editing system for the treatment of low back pain comprises one or more sgRNAs targeting exon 4 of cIL1RAP. In some embodiments, the CRISPR gene-editing system for the treatment of low back pain comprises one or more sgRNAs targeting exon 5 of cIL1RAP. In some embodiments, the CRISPR gene-editing system for the treatment of low back pain comprises one or more sgRNAs targeting exon 6 of cIL1RAP. In some embodiments, the CRISPR gene-editing system for the treatment of low back pain comprises one or more sgRNAs targeting exon 7 of cIL1RAP. In some embodiments, the CRISPR gene-editing system for the treatment of low back pain comprises one or more sgRNAs targeting exon 8 of cIL1RAP. In some embodiments, the CRISPR gene-editing system for the treatment of low back pain comprises one or more sgRNAs targeting exon 9 of cIL1RAP. In some embodiments, the CRISPR gene-editing system for the treatment of low back pain comprises one or more sgRNAs targeting exon 10 of cIL1RAP. In some embodiments, the CRISPR gene-editing system for the treatment of low back pain comprises one or more sgRNAs targeting exon 11 of cIL1RAP. In some embodiments, the CRISPR gene-editing system for the treatment of low back pain comprises one or more sgRNAs targeting exon 12 of cIL1RAP. In some embodiments, the CRISPR gene-editing system for the treatment of low back pain comprises one or more sgRNAs targeting exon 13 of cIL1RAP. In some embodiments, the CRISPR gene-editing system for the treatment of low back pain comprises one or more sgRNAs targeting exon 14 of cIL1RAP. In some embodiments, the CRISPR gene-editing system for the treatment of low back pain comprises one or more sgRNAs targeting exon 15 of cIL1RAP. In some embodiments, the CRISPR gene-editing system for the treatment of low back pain comprises one or more sgRNAs targeting exon 16 of cIL1RAP.

[0353] In some embodiments, the CRISPR gene-editing system for the treatment of low back pain comprises one or more sgRNAs targeting exon 1 of eIL1RAP. In some embodiments, the CRISPR gene-editing system for the treatment of low back pain comprises one or more sgRNAs targeting exon 2 of eIL1RAP. In some embodiments, the CRISPR gene-editing system for the treatment of low back pain comprises one or more sgRNAs targeting exon 3 of eIL1RAP. In some embodiments, the CRISPR gene-editing system for the treatment of low back pain comprises one or more sgRNAs targeting exon 4 of eIL1RAP. In some embodiments, the CRISPR gene-editing system for the treatment of low back pain comprises one or more sgRNAs targeting exon 5 of eIL1RAP. In some embodiments, the CRISPR gene-editing system for the treatment of low back pain comprises one or more sgRNAs targeting exon 6 of eIL1RAP. In some embodiments, the CRISPR gene-editing system for the treatment of low back pain comprises one or more sgRNAs targeting exon 7 of eIL1RAP. In some embodiments, the CRISPR gene-editing system for the treatment of low back pain comprises one or more sgRNAs targeting exon 8 of eIL1RAP. In some embodiments, the CRISPR gene-editing system for the treatment of low back pain comprises one or more sgRNAs targeting exon 9 of eIL1RAP. In some embodiments, the CRISPR gene-editing system for the treatment of low back pain comprises one or more sgRNAs targeting exon 10 of eIL1RAP. In some embodiments, the CRISPR gene-editing system for the treatment of low back pain comprises one or more sgRNAs targeting exon 11 of eIL1RAP. In some embodiments, the CRISPR gene-editing system for the treatment of low back pain comprises one or more sgRNAs targeting exon 12 of eIL1RAP. In some embodiments, the CRISPR gene-editing system for the treatment of low back pain comprises one or more sgRNAs targeting exon 13 of eIL1RAP.

[0354] In some embodiments, the CRISPR gene-editing system for the treatment of low back pain comprises one or more sgRNAs targeting exon 1 of fIL1RAP. In some embodiments, the CRISPR gene-editing system for the treatment of low back pain comprises one or more sgRNAs targeting exon 2 of fIL1RAP. In some embodiments, the CRISPR gene-editing system for the treatment of low back pain comprises one or more sgRNAs targeting exon 3 of fIL1RAP. In some embodiments, the CRISPR gene-editing system for the treatment of low back pain comprises one or more sgRNAs targeting exon 4 of fIL1RAP. In some embodiments, the CRISPR gene-editing system for the treatment of low back pain comprises one or more sgRNAs targeting exon 5 of fIL1RAP. In some embodiments, the CRISPR gene-editing system for the treatment of low back pain comprises one or more sgRNAs targeting exon 6 of fIL1RAP. In some embodiments, the CRISPR gene-editing system for the treatment of low back pain comprises one or more sgRNAs targeting exon 7 of fIL1RAP. In some embodiments, the CRISPR gene-editing system for the treatment of low back pain comprises one or more sgRNAs targeting exon 8 of fIL1RAP. In some embodiments, the CRISPR gene-editing system for the treatment of low back pain comprises one or more sgRNAs targeting exon 9 of fIL1RAP. In some embodiments, the CRISPR gene-editing system for the treatment of low back pain comprises one or more sgRNAs targeting exon 10 of fIL1RAP. In some embodiments, the CRISPR gene-editing system for the treatment of low back pain comprises one or more sgRNAs targeting exon 11 of fIL1RAP. In some embodiments, the CRISPR gene-editing system for the treatment of low back pain comprises one or more sgRNAs targeting exon 12 of fIL1RAP. In some embodiments, the CRISPR gene-editing system for the treatment of low back pain comprises one or more sgRNAs targeting exon 13 of fIL1RAP. In some embodiments, the CRISPR gene-editing system for the treatment of low back pain comprises one or more sgRNAs targeting exon 14 of fIL1RAP.

[0355] In some embodiments, the CRISPR gene-editing system for the treatment of low back pain comprises one or more sgRNAs targeting TGFBR1. In some embodiments, the CRISPR gene-editing system for the treatment of low back pain comprises one or more sgRNAs targeting hTGFBR1. In some embodiments, the CRISPR gene-editing system for the treatment of low back pain comprises one or more sgRNAs targeting cTGFBR1. In some embodiments, the CRISPR gene-editing system for the treatment of low back pain comprises one or more sgRNAs targeting e TGFBR1. In some embodiments, the CRISPR gene-editing system for the treatment of low back pain comprises one or more sgRNAs targeting fTGFBR1.

[0356] In some embodiments, the CRISPR gene-editing system for the treatment of low back pain comprises one or more sgRNAs targeting exon 1 of hTGFBR1. In some embodiments, the CRISPR gene-editing system for the treatment of low back pain comprises one or more sgRNAs targeting exon 2 of hTGFBR1. In some embodiments, the CRISPR gene-editing system for the treatment of low back pain comprises one or more sgRNAs targeting exon 3 of hTGFBR1. In some embodiments, the CRISPR gene-editing system for the treatment of low back pain comprises one or more sgRNAs targeting exon 4 of hTGFBR1. In some embodiments, the CRISPR gene-editing system for the treatment of low back pain comprises one or more sgRNAs targeting exon 5 of hTGFBR1. In some embodiments, the CRISPR gene-editing system for the treatment of low back pain comprises one or more sgRNAs targeting exon 6 of hTGFBR1. In some embodiments, the CRISPR gene-editing system for the treatment of low back pain comprises one or more sgRNAs targeting exon 7 of hTGFBR1. In some embodiments, the CRISPR gene-editing system for the treatment of low back pain comprises one or more sgRNAs targeting exon 8 of hTGFBR1. In some embodiments, the CRISPR gene-editing system for the treatment of low back pain comprises one or more sgRNAs targeting exon 9 of hTGFBR1. In some embodiments, the CRISPR gene-editing system for the treatment of low back pain comprises one or more sgRNAs targeting exon 10 of hTGFBR1. In some embodiments, the CRISPR gene-editing system for the treatment of low back pain comprises one or more sgRNAs targeting exon 11 of hTGFBR1.

[0357] In some embodiments, the CRISPR gene-editing system for the treatment of low back pain comprises one or more sgRNAs targeting exon 1 of cTGFBR1. In some embodiments, the CRISPR gene-editing system for the treatment of low back pain comprises one or more sgRNAs targeting exon 2 of cTGFBR1. In some embodiments, the CRISPR gene-editing system for the treatment of low back pain comprises one or more sgRNAs targeting exon 3 of cTGFBR1. In some embodiments, the CRISPR gene-editing system for the treatment of low back pain comprises one or more sgRNAs targeting exon 4 of cTGFBR1. In some embodiments, the CRISPR gene-editing system for the treatment of low back pain comprises one or more sgRNAs targeting exon 5 of cTGFBR1. In some embodiments, the CRISPR gene-editing system for the treatment of low back pain comprises one or more sgRNAs targeting exon 6 of cTGFBR1. In some embodiments, the CRISPR gene-editing system for the treatment of low back pain comprises one or more sgRNAs targeting exon 7 of cTGFBR1. In some embodiments, the CRISPR gene-editing system for the treatment of low back pain comprises one or more sgRNAs targeting exon 8 of cTGFBR1. In some embodiments, the CRISPR gene-editing system for the treatment of low back pain comprises one or more sgRNAs targeting exon 9 of cTGFBR1.

[0358] In some embodiments, the CRISPR gene-editing system for the treatment of low back pain comprises one or more sgRNAs targeting exon 1 of eTGFBR1. In some embodiments, the CRISPR gene-editing system for the treatment of low back pain comprises one or more sgRNAs targeting exon 2 of eTGFBR1. In some embodiments, the CRISPR gene-editing system for the treatment of low back pain comprises one or more sgRNAs targeting exon 3 of eTGFBR1. In some embodiments, the CRISPR gene-editing system for the treatment of low back pain comprises one or more sgRNAs targeting exon 4 of eTGFBR1. In some embodiments, the CRISPR gene-editing system for the treatment of low back pain comprises one or more sgRNAs targeting exon 5 of eTGFBR1. In some embodiments, the CRISPR gene-editing system for the treatment of low back pain comprises one or more sgRNAs targeting exon 6 of eTGFBR1. In some embodiments, the CRISPR gene-editing system for the treatment of low back pain comprises one or more sgRNAs targeting exon 7 of eTGFBR1. In some embodiments, the CRISPR gene-editing system for the treatment of low back pain comprises one or more sgRNAs targeting exon 8 of eTGFBR1. In some embodiments, the CRISPR gene-editing system for the treatment of low back pain comprises one or more sgRNAs targeting exon 9 of eTGFBR1. In some embodiments, the CRISPR gene-editing system for the treatment of low back pain comprises one or more sgRNAs targeting exon 10 of eTGFBR1. In some embodiments, the CRISPR gene-editing system for the treatment of low back pain comprises one or more sgRNAs targeting exon 11 of eTGFBR1. In some embodiments, the CRISPR gene-editing system for the treatment of low back pain comprises one or more sgRNAs targeting exon 12 of eTGFBR1.

[0359] In some embodiments, the CRISPR gene-editing system for the treatment of low back pain comprises one or more sgRNAs targeting exon 1 of fTGFBR1. In some embodiments, the CRISPR gene-editing system for the treatment of low back pain comprises one or more sgRNAs targeting exon 2 of fTGFBR1. In some embodiments, the CRISPR gene-editing system for the treatment of low back pain comprises one or more sgRNAs targeting exon 3 of fTGFBR1. In some embodiments, the CRISPR gene-editing system for the treatment of low back pain comprises one or more sgRNAs targeting exon 4 of fTGFBR1. In some embodiments, the CRISPR gene-editing system for the treatment of low back pain comprises one or more sgRNAs targeting exon 5 of fTGFBR1. In some embodiments, the CRISPR gene-editing system for the treatment of low back pain comprises one or more sgRNAs targeting exon 6 of fTGFBR1. In some embodiments, the CRISPR gene-editing system for the treatment of low back pain comprises one or more sgRNAs targeting exon 7 of fTGFBR1. In some embodiments, the CRISPR gene-editing system for the treatment of low back pain comprises one or more sgRNAs targeting exon 8 of fTGFBR1. In some embodiments, the CRISPR gene-editing system for the treatment of low back pain comprises one or more sgRNAs targeting exon 9 of fTGFBR1. In some embodiments, the CRISPR gene-editing system for the treatment of low back pain comprises one or more sgRNAs targeting exon 10 of fTGFBR1. In some embodiments, the CRISPR gene-editing system for the treatment of low back pain comprises one or more sgRNAs targeting exon 11 of fTGFBR1.

[0360] In some embodiments, the CRISPR gene-editing system for the treatment of low back pain comprises one or more sgRNAs targeting TGFBR2. In some embodiments, the CRISPR gene-editing system for the treatment of low back pain comprises one or more sgRNAs targeting hTGFBR2. In some embodiments, the CRISPR gene-editing system for the treatment of low back pain comprises one or more sgRNAs targeting cTGFBR2. In some embodiments, the CRISPR gene-editing system for the treatment of low back pain comprises one or more sgRNAs targeting eTGFBR2. In some embodiments, the CRISPR gene-editing system for the treatment of low back pain comprises one or more sgRNAs targeting fTGFBR2.

[0361] In some embodiments, the CRISPR gene-editing system for the treatment of low back pain comprises one or more sgRNAs targeting exon 1 of hTGFBR2. In some embodiments, the CRISPR gene-editing system for the treatment of low back pain comprises one or more sgRNAs targeting exon 2 of hTGFBR2. In some embodiments, the CRISPR gene-editing system for the treatment of low back pain comprises one or more sgRNAs targeting exon 3 of hTGFBR2. In some embodiments, the CRISPR gene-editing system for the treatment of low back pain comprises one or more sgRNAs targeting exon 4 of hTGFBR2. In some embodiments, the CRISPR gene-editing system for the treatment of low back pain comprises one or more sgRNAs targeting exon 5 of hTGFBR2. In some embodiments, the CRISPR gene-editing system for the treatment of low back pain comprises one or more sgRNAs targeting exon 6 of hTGFBR2. In some embodiments, the CRISPR gene-editing system for the treatment of low back pain comprises one or more sgRNAs targeting exon 7 of hTGFBR2. In some embodiments, the CRISPR gene-editing system for the treatment of low back pain comprises one or more sgRNAs targeting exon 8 of hTGFBR2. In some embodiments, the CRISPR gene-editing system for the treatment of low back pain comprises one or more sgRNAs targeting exon 9 of hTGFBR2.

[0362] In some embodiments, the CRISPR gene-editing system for the treatment of low back pain comprises one or more sgRNAs targeting exon 1 of cTGFBR2. In some embodiments, the CRISPR gene-editing system for the treatment of low back pain comprises one or more sgRNAs targeting exon 2 of cTGFBR2. In some embodiments, the CRISPR gene-editing system for the treatment of low back pain comprises one or more sgRNAs targeting exon 3 of cTGFBR2. In some embodiments, the CRISPR gene-editing system for the treatment of low back pain comprises one or more sgRNAs targeting exon 4 of cTGFBR2. In some embodiments, the CRISPR gene-editing system for the treatment of low back pain comprises one or more sgRNAs targeting exon 5 of cTGFBR2. In some embodiments, the CRISPR gene-editing system for the treatment of low back pain comprises one or more sgRNAs targeting exon 6 of cTGFBR2. In some embodiments, the CRISPR gene-editing system for the treatment of low back pain comprises one or more sgRNAs targeting exon 7 of cTGFBR2. In some embodiments, the CRISPR gene-editing system for the treatment of low back pain comprises one or more sgRNAs targeting exon 8 of cTGFBR2.

[0363] In some embodiments, the CRISPR gene-editing system for the treatment of low back pain comprises one or more sgRNAs targeting exon 1 of eTGFBR2. In some embodiments, the CRISPR gene-editing system for the treatment of low back pain comprises one or more sgRNAs targeting exon 2 of eTGFBR2. In some embodiments, the CRISPR gene-editing system for the treatment of low back pain comprises one or more sgRNAs targeting exon 3 of eTGFBR2. In some embodiments, the CRISPR gene-editing system for the treatment of low back pain comprises one or more sgRNAs targeting exon 4 of eTGFBR2. In some embodiments, the CRISPR gene-editing system for the treatment of low back pain comprises one or more sgRNAs targeting exon 5 of eTGFBR2. In some embodiments, the CRISPR gene-editing system for the treatment of low back pain comprises one or more sgRNAs targeting exon 6 of eTGFBR2. In some embodiments, the CRISPR gene-editing system for the treatment of low back pain comprises one or more sgRNAs targeting exon 7 of eTGFBR2. In some embodiments, the CRISPR gene-editing system for the treatment of low back pain comprises one or more sgRNAs targeting exon 8 of eTGFBR2. In some embodiments, the CRISPR gene-editing system for the treatment of low back pain comprises one or more sgRNAs targeting exon 9 of eTGFBR2. In some embodiments, the CRISPR gene-editing system for the treatment of low back pain comprises one or more sgRNAs targeting exon 10 of eTGFBR2.

[0364] In some embodiments, the CRISPR gene-editing system for the treatment of low back pain comprises one or more sgRNAs targeting exon 1 of fTGFBR2. In some embodiments, the CRISPR gene-editing system for the treatment of low back pain comprises one or more sgRNAs targeting exon 2 of fTGFBR2. In some embodiments, the CRISPR gene-editing system for the treatment of low back pain comprises one or more sgRNAs targeting exon 3 of fTGFBR2. In some embodiments, the CRISPR gene-editing system for the treatment of low back pain comprises one or more sgRNAs targeting exon 4 of fTGFBR2. In some embodiments, the CRISPR gene-editing system for the treatment of low back pain comprises one or more sgRNAs targeting exon 5 of fTGFBR2. In some embodiments, the CRISPR gene-editing system for the treatment of low back pain comprises one or more sgRNAs targeting exon 6 of fTGFBR2. In some embodiments, the CRISPR gene-editing system for the treatment of low back pain comprises one or more sgRNAs targeting exon 7 of fTGFBR2. In some embodiments, the CRISPR gene-editing system for the treatment of low back pain comprises one or more sgRNAs targeting exon 8 of fTGFBR2.

[0365] In some embodiments, the CRISPR gene-editing system for the treatment of low back pain comprises one or more sgRNAs targeting IL6R. In some embodiments, the CRISPR gene-editing system for the treatment of low back pain comprises one or more sgRNAs targeting hIL6R. In some embodiments, the CRISPR gene-editing system for the treatment of low back pain comprises one or more sgRNAs targeting cIL6R. In some embodiments, the CRISPR gene-editing system for the treatment of low back pain comprises one or more sgRNAs targeting eIL6R. In some embodiments, the CRISPR gene-editing system for the treatment of low back pain comprises one or more sgRNAs targeting fIL6R.

[0366] In some embodiments, the CRISPR gene-editing system for the treatment of low back pain comprises one or more sgRNAs targeting exon 1 of hIL6R. In some embodiments, the CRISPR gene-editing system for the treatment of low back pain comprises one or more sgRNAs targeting exon 2 of hIL6R. In some embodiments, the CRISPR gene-editing system for the treatment of low back pain comprises one or more sgRNAs targeting exon 3 of hIL6R. In some embodiments, the CRISPR gene-editing system for the treatment of low back pain comprises one or more sgRNAs targeting exon 4 of hIL6R. In some embodiments, the CRISPR gene-editing system for the treatment of low back pain comprises one or more sgRNAs targeting exon 5 of hIL6R. In some embodiments, the CRISPR gene-editing system for the treatment of low back pain comprises one or more sgRNAs targeting exon 6 of hIL6R. In some embodiments, the CRISPR gene-editing system for the treatment of low back pain comprises one or more sgRNAs targeting exon 7 of hIL6R. In some embodiments, the CRISPR gene-editing system for the treatment of low back pain comprises one or more sgRNAs targeting exon 8 of hIL6R. In some embodiments, the CRISPR gene-editing system for the treatment of low back pain comprises one or more sgRNAs targeting exon 9 of hIL6R. In some embodiments, the CRISPR gene-editing system for the treatment of low back pain comprises one or more sgRNAs targeting exon 10 of hIL6R. In some embodiments, the CRISPR gene-editing system for the treatment of low back pain comprises one or more sgRNAs targeting exon 11 of hIL6R In some embodiments, the CRISPR gene-editing system for the treatment of low back pain comprises one or more sgRNAs targeting exon 12 of hIL6R. In some embodiments, the CRISPR gene-editing system for the treatment of low back pain comprises one or more sgRNAs targeting exon 13 of hIL6R. In some embodiments, the CRISPR gene-editing system for the treatment of low back pain comprises one or more sgRNAs targeting exon 14 of hIL6R. In some embodiments, the CRISPR gene-editing system for the treatment of low back pain comprises one or more sgRNAs targeting exon 15 of hIL6R.

[0367] In some embodiments, the CRISPR gene-editing system for the treatment of low back pain comprises one or more sgRNAs targeting exon 1 of cIL6R. In some embodiments, the CRISPR gene-editing system for the treatment of low back pain comprises one or more sgRNAs targeting exon 2 of cIL6R. In some embodiments, the CRISPR gene-editing system for the treatment of low back pain comprises one or more sgRNAs targeting exon 3 of cIL6R. In some embodiments, the CRISPR gene-editing system for the treatment of low back pain comprises one or more sgRNAs targeting exon 4 of cIL6R. In some embodiments, the CRISPR gene-editing system for the treatment of low back pain comprises one or more sgRNAs targeting exon 5 of cIL6R. In some embodiments, the CRISPR gene-editing system for the treatment of low back pain comprises one or more sgRNAs targeting exon 6 of cIL6R. In some embodiments, the CRISPR gene-editing system for the treatment of low back pain comprises one or more sgRNAs targeting exon 7 of cIL6R. In some embodiments, the CRISPR gene-editing system for the treatment of low back pain comprises one or more sgRNAs targeting exon 8 of cIL6R. In some embodiments, the CRISPR gene-editing system for the treatment of low back pain comprises one or more sgRNAs targeting exon 9 of cIL6R. In some embodiments, the CRISPR gene-editing system for the treatment of low back pain comprises one or more sgRNAs targeting exon 10 of cIL6R. In some embodiments, the CRISPR gene-editing system for the treatment of low back pain comprises one or more sgRNAs targeting exon 11 of cIL6R. In some embodiments, the CRISPR gene-editing system for the treatment of low back pain comprises one or more sgRNAs targeting exon 12 of cIL6R. In some embodiments, the CRISPR gene-editing system for the treatment of low back pain comprises one or more sgRNAs targeting exon 13 of cIL6R.

[0368] In some embodiments, the CRISPR gene-editing system for the treatment of low back pain comprises one or more sgRNAs targeting exon 1 of eIL6R. In some embodiments, the CRISPR gene-editing system for the treatment of low back pain comprises one or more sgRNAs targeting exon 2 of eIL6R. In some embodiments, the CRISPR gene-editing system for the treatment of low back pain comprises one or more sgRNAs targeting exon 3 of eIL6R. In some embodiments, the CRISPR gene-editing system for the treatment of low back pain comprises one or more sgRNAs targeting exon 4 of eIL6R. In some embodiments, the CRISPR gene-editing system for the treatment of low back pain comprises one or more sgRNAs targeting exon 5 of eIL6R. In some embodiments, the CRISPR gene-editing system for the treatment of low back pain comprises one or more sgRNAs targeting exon 6 of eIL6R. In some embodiments, the CRISPR gene-editing system for the treatment of low back pain comprises one or more sgRNAs targeting exon 7 of eIL6R. In some embodiments, the CRISPR gene-editing system for the treatment of low back pain comprises one or more sgRNAs targeting exon 8 of eIL6R. In some embodiments, the CRISPR gene-editing system for the treatment of low back pain comprises one or more sgRNAs targeting exon 9 of eIL6R. In some embodiments, the CRISPR gene-editing system for the treatment of low back pain comprises one or more sgRNAs targeting exon 10 of eIL6R. In some embodiments, the CRISPR gene-editing system for the treatment of low back pain comprises one or more sgRNAs targeting exon 11 of eIL6R.

[0369] In some embodiments, the CRISPR gene-editing system for the treatment of low back pain comprises one or more sgRNAs targeting exon 1 of fIL6R. In some embodiments, the CRISPR gene-editing system for the treatment of low back pain comprises one or more sgRNAs targeting exon 2 of fIL6R. In some embodiments, the CRISPR gene-editing system for the treatment of low back pain comprises one or more sgRNAs targeting exon 3 of fIL6R. In some embodiments, the CRISPR gene-editing system for the treatment of low back pain comprises one or more sgRNAs targeting exon 4 of fIL6R. In some embodiments, the CRISPR gene-editing system for the treatment of low back pain comprises one or more sgRNAs targeting exon 5 of fIL6R. In some embodiments, the CRISPR gene-editing system for the treatment of low back pain comprises one or more sgRNAs targeting exon 6 of fIL6R. In some embodiments, the CRISPR gene-editing system for the treatment of low back pain comprises one or more sgRNAs targeting exon 7 of fIL6R. In some embodiments, the CRISPR gene-editing system for the treatment of low back pain comprises one or more sgRNAs targeting exon 8 of fIL6R. In some embodiments, the CRISPR gene-editing system for the treatment of low back pain comprises one or more sgRNAs targeting exon 9 of fIL6R. In some embodiments, the CRISPR gene-editing system for the treatment of low back pain comprises one or more sgRNAs targeting exon 10 of fIL6R.

[0370] In some embodiments, the CRISPR gene-editing system for the treatment of low back pain comprises one or more sgRNAs targeting IL6ST. In some embodiments, the CRISPR gene-editing system for the treatment of low back pain comprises one or more sgRNAs targeting hIL6ST. In some embodiments, the CRISPR gene-editing system for the treatment of low back pain comprises one or more sgRNAs targeting cIL6ST. In some embodiments, the CRISPR gene-editing system for the treatment of low back pain comprises one or more sgRNAs targeting eIL6ST. In some embodiments, the CRISPR gene-editing system for the treatment of low back pain comprises one or more sgRNAs targeting fIL6ST.

[0371] In some embodiments, the CRISPR gene-editing system for the treatment of low back pain comprises one or more sgRNAs targeting exon 1 of hIL6ST. In some embodiments, the CRISPR gene-editing system for the treatment of low back pain comprises one or more sgRNAs targeting exon 2 of hIL6ST. In some embodiments, the CRISPR gene-editing system for the treatment of low back pain comprises one or more sgRNAs targeting exon 3 of hIL6ST. In some embodiments, the CRISPR gene-editing system for the treatment of low back pain comprises one or more sgRNAs targeting exon 4 of hIL6ST. In some embodiments, the CRISPR gene-editing system for the treatment of low back pain comprises one or more sgRNAs targeting exon 5 of hIL6ST. In some embodiments, the CRISPR gene-editing system for the treatment of low back pain comprises one or more sgRNAs targeting exon 6 of hIL6ST. In some embodiments, the CRISPR gene-editing system for the treatment of low back pain comprises one or more sgRNAs targeting exon 7 of hIL6ST. In some embodiments, the CRISPR gene-editing system for the treatment of low back pain comprises one or more sgRNAs targeting exon 8 of hIL6ST. In some embodiments, the CRISPR gene-editing system for the treatment of low back pain comprises one or more sgRNAs targeting exon 9 of hIL6ST. In some embodiments, the CRISPR gene-editing system for the treatment of low back pain comprises one or more sgRNAs targeting exon 10 of hIL6ST. In some embodiments, the CRISPR gene-editing system for the treatment of low back pain comprises one or more sgRNAs targeting exon 11 of hIL6ST. In some embodiments, the CRISPR gene-editing system for the treatment of low back pain comprises one or more sgRNAs targeting exon 12 of hIL6ST. In some embodiments, the CRISPR gene-editing system for the treatment of low back pain comprises one or more sgRNAs targeting exon 13 of hIL6ST. In some embodiments, the CRISPR gene-editing system for the treatment of low back pain comprises one or more sgRNAs targeting exon 14 of hIL6ST. In some embodiments, the CRISPR gene-editing system for the treatment of low back pain comprises one or more sgRNAs targeting exon 15 of hIL6ST. In some embodiments, the CRISPR gene-editing system for the treatment of low back pain comprises one or more sgRNAs targeting exon 16 of hIL6ST. In some embodiments, the CRISPR gene-editing system for the treatment of low back pain comprises one or more sgRNAs targeting exon 17 of hIL6ST. In some embodiments, the CRISPR gene-editing system for the treatment of low back pain comprises one or more sgRNAs targeting exon 18 of hIL6ST. In some embodiments, the CRISPR gene-editing system for the treatment of low back pain comprises one or more sgRNAs targeting exon 19 of hIL6ST.

[0372] In some embodiments, the CRISPR gene-editing system for the treatment of low back pain comprises one or more sgRNAs targeting exon 1 of cIL6ST. In some embodiments, the CRISPR gene-editing system for the treatment of low back pain comprises one or more sgRNAs targeting exon 2 of cIL6ST. In some embodiments, the CRISPR gene-editing system for the treatment of low back pain comprises one or more sgRNAs targeting exon 3 of cIL6ST. In some embodiments, the CRISPR gene-editing system for the treatment of low back pain comprises one or more sgRNAs targeting exon 4 of cIL6ST. In some embodiments, the CRISPR gene-editing system for the treatment of low back pain comprises one or more sgRNAs targeting exon 5 of cIL6ST. In some embodiments, the CRISPR gene-editing system for the treatment of low back pain comprises one or more sgRNAs targeting exon 6 of cIL6ST. In some embodiments, the CRISPR gene-editing system for the treatment of low back pain comprises one or more sgRNAs targeting exon 7 of cIL6ST. In some embodiments, the CRISPR gene-editing system for the treatment of low back pain comprises one or more sgRNAs targeting exon 8 of cIL6ST. In some embodiments, the CRISPR gene-editing system for the treatment of low back pain comprises one or more sgRNAs targeting exon 9 of cIL6ST. In some embodiments, the CRISPR gene-editing system for the treatment of low back pain comprises one or more sgRNAs targeting exon 10 of cIL6ST. In some embodiments, the CRISPR gene-editing system for the treatment of low back pain comprises one or more sgRNAs targeting exon 11 of cIL6ST In some embodiments, the CRISPR gene-editing system for the treatment of low back pain comprises one or more sgRNAs targeting exon 12 of cIL6ST. In some embodiments, the CRISPR gene-editing system for the treatment of low back pain comprises one or more sgRNAs targeting exon 13 of cIL6ST. In some embodiments, the CRISPR gene-editing system for the treatment of low back pain comprises one or more sgRNAs targeting exon 14 of cIL6ST. In some embodiments, the CRISPR gene-editing system for the treatment of low back pain comprises one or more sgRNAs targeting exon 15 of cIL6ST. In some embodiments, the CRISPR gene-editing system for the treatment of low back pain comprises one or more sgRNAs targeting exon 16 of cIL6ST. In some embodiments, the CRISPR gene-editing system for the treatment of low back pain comprises one or more sgRNAs targeting exon 17 of cIL6ST. In some embodiments, the CRISPR gene-editing system for the treatment of low back pain comprises one or more sgRNAs targeting exon 18 of cIL6ST.

[0373] In some embodiments, the CRISPR gene-editing system for the treatment of low back pain comprises one or more sgRNAs targeting exon 1 of eIL6ST. In some embodiments, the CRISPR gene-editing system for the treatment of low back pain comprises one or more sgRNAs targeting exon 2 of eIL6ST. In some embodiments, the CRISPR gene-editing system for the treatment of low back pain comprises one or more sgRNAs targeting exon 3 of eIL6ST. In some embodiments, the CRISPR gene-editing system for the treatment of low back pain comprises one or more sgRNAs targeting exon 4 of eIL6ST. In some embodiments, the CRISPR gene-editing system for the treatment of low back pain comprises one or more sgRNAs targeting exon 5 of eIL6ST. In some embodiments, the CRISPR gene-editing system for the treatment of low back pain comprises one or more sgRNAs targeting exon 6 of eIL6ST. In some embodiments, the CRISPR gene-editing system for the treatment of low back pain comprises one or more sgRNAs targeting exon 7 of eIL6ST. In some embodiments, the CRISPR gene-editing system for the treatment of low back pain comprises one or more sgRNAs targeting exon 8 of eIL6ST. In some embodiments, the CRISPR gene-editing system for the treatment of low back pain comprises one or more sgRNAs targeting exon 9 of eIL6ST. In some embodiments, the CRISPR gene-editing system for the treatment of low back pain comprises one or more sgRNAs targeting exon 10 of eIL6ST. In some embodiments, the CRISPR gene-editing system for the treatment of low back pain comprises one or more sgRNAs targeting exon 11 of eIL6ST In some embodiments, the CRISPR gene-editing system for the treatment of low back pain comprises one or more sgRNAs targeting exon 12 of eIL6ST. In some embodiments, the CRISPR gene-editing system for the treatment of low back pain comprises one or more sgRNAs targeting exon 13 of eIL6ST. In some embodiments, the CRISPR gene-editing system for the treatment of low back pain comprises one or more sgRNAs targeting exon 14 of eIL6ST. In some embodiments, the CRISPR gene-editing system for the treatment of low back pain comprises one or more sgRNAs targeting exon 15 of eIL6ST. In some embodiments, the CRISPR gene-editing system for the treatment of low back pain comprises one or more sgRNAs targeting exon 16 of eIL6ST. In some embodiments, the CRISPR gene-editing system for the treatment of low back pain comprises one or more sgRNAs targeting exon 17 of eIL6ST. In some embodiments, the CRISPR gene-editing system for the treatment of low back pain comprises one or more sgRNAs targeting exon 18 of eIL6ST.

[0374] In some embodiments, the CRISPR gene-editing system for the treatment of low back pain comprises one or more sgRNAs targeting exon 1 of fIL6ST. In some embodiments, the CRISPR gene-editing system for the treatment of low back pain comprises one or more sgRNAs targeting exon 2 of fIL6ST. In some embodiments, the CRISPR gene-editing system for the treatment of low back pain comprises one or more sgRNAs targeting exon 3 of fIL6ST. In some embodiments, the CRISPR gene-editing system for the treatment of low back pain comprises one or more sgRNAs targeting exon 4 of fIL6ST. In some embodiments, the CRISPR gene-editing system for the treatment of low back pain comprises one or more sgRNAs targeting exon 5 of fIL6ST. In some embodiments, the CRISPR gene-editing system for the treatment of low back pain comprises one or more sgRNAs targeting exon 6 of fIL6ST. In some embodiments, the CRISPR gene-editing system for the treatment of low back pain comprises one or more sgRNAs targeting exon 7 of fIL6ST. In some embodiments, the CRISPR gene-editing system for the treatment of low back pain comprises one or more sgRNAs targeting exon 8 of fIL6ST. In some embodiments, the CRISPR gene-editing system for the treatment of low back pain comprises one or more sgRNAs targeting exon 9 of fIL6ST. In some embodiments, the CRISPR gene-editing system for the treatment of low back pain comprises one or more sgRNAs targeting exon 10 of fIL6ST. In some embodiments, the CRISPR gene-editing system for the treatment of low back pain comprises one or more sgRNAs targeting exon 11 of fIL6ST In some embodiments, the CRISPR gene-editing system for the treatment of low back pain comprises one or more sgRNAs targeting exon 12 of fIL6ST. In some embodiments, the CRISPR gene-editing system for the treatment of low back pain comprises one or more sgRNAs targeting exon 13 of fIL6ST. In some embodiments, the CRISPR gene-editing system for the treatment of low back pain comprises one or more sgRNAs targeting exon 14 of fIL6ST. In some embodiments, the CRISPR gene-editing system for the treatment of low back pain comprises one or more sgRNAs targeting exon 15 of fIL6ST. In some embodiments, the CRISPR gene-editing system for the treatment of low back pain comprises one or more sgRNAs targeting exon 16 of fIL6ST. In some embodiments, the CRISPR gene-editing system for the treatment of low back pain comprises one or more sgRNAs targeting exon 17 of fIL6ST. In some embodiments, the CRISPR gene-editing system for the treatment of low back pain comprises one or more sgRNAs targeting exon 18 of fIL6ST. In some embodiments, the CRISPR gene-editing system for the treatment of low back pain comprises one or more sgRNAs targeting exon 19 of fIL6ST. In some embodiments, the CRISPR gene-editing system for the treatment of low back pain comprises one or more sgRNAs targeting exon 20 of fIL6ST.

[0375] In some embodiments, the CRISPR gene-editing system for the treatment of low back pain comprises one or more sgRNAs targeting TNFRSF1A. In some embodiments, the CRISPR gene-editing system for the treatment of low back pain comprises one or more sgRNAs targeting hTNFRSF1A. In some embodiments, the CRISPR gene-editing system for the treatment of low back pain comprises one or more sgRNAs targeting cTNFRSF1A. In some embodiments, the CRISPR gene-editing system for the treatment of low back pain comprises one or more sgRNAs targeting eTNFRSF1A. In some embodiments, the CRISPR gene-editing system for the treatment of low back pain comprises one or more sgRNAs targeting fTNFRSF1A.

[0376] In some embodiments, the CRISPR gene-editing system for the treatment of low back pain comprises one or more sgRNAs targeting exon 1 of hTNFRSF1A. In some embodiments, the CRISPR gene-editing system for the treatment of low back pain comprises one or more sgRNAs targeting exon 2 of hTNFRSF1A. In some embodiments, the CRISPR gene-editing system for the treatment of low back pain comprises one or more sgRNAs targeting exon 3 of hTNFRSF1A. In some embodiments, the CRISPR gene-editing system for the treatment of low back pain comprises one or more sgRNAs targeting exon 4 of hTNFRSF1A. In some embodiments, the CRISPR gene-editing system for the treatment of low back pain comprises one or more sgRNAs targeting exon 5 of hTNFRSF1A. In some embodiments, the CRISPR gene-editing system for the treatment of low back pain comprises one or more sgRNAs targeting exon 6 of hTNFRSF1A. In some embodiments, the CRISPR gene-editing system for the treatment of low back pain comprises one or more sgRNAs targeting exon 7 of hTNFRSF1A. In some embodiments, the CRISPR gene-editing system for the treatment of low back pain comprises one or more sgRNAs targeting exon 8 of hTNFRSF1A. In some embodiments, the CRISPR gene-editing system for the treatment of low back pain comprises one or more sgRNAs targeting exon 9 of hTNFRSF1A. In some embodiments, the CRISPR gene-editing system for the treatment of low back pain comprises one or more sgRNAs targeting exon 10 of hTNFRSF1A. In some embodiments, the CRISPR gene-editing system for the treatment of low back pain comprises one or more sgRNAs targeting exon 11 of hTNFRSF1A.

[0377] In some embodiments, the CRISPR gene-editing system for the treatment of low back pain comprises one or more sgRNAs targeting exon 1 of cTNFRSF1A. In some embodiments, the CRISPR gene-editing system for the treatment of low back pain comprises one or more sgRNAs targeting exon 2 of cTNFRSF1A. In some embodiments, the CRISPR gene-editing system for the treatment of low back pain comprises one or more sgRNAs targeting exon 3 of cTNFRSF1A. In some embodiments, the CRISPR gene-editing system for the treatment of low back pain comprises one or more sgRNAs targeting exon 4 of cTNFRSF1A. In some embodiments, the CRISPR gene-editing system for the treatment of low back pain comprises one or more sgRNAs targeting exon 5 of cTNFRSF1A. In some embodiments, the CRISPR gene-editing system for the treatment of low back pain comprises one or more sgRNAs targeting exon 6 of cTNFRSF1A. In some embodiments, the CRISPR gene-editing system for the treatment of low back pain comprises one or more sgRNAs targeting exon 7 of cTNFRSF1A. In some embodiments, the CRISPR gene-editing system for the treatment of low back pain comprises one or more sgRNAs targeting exon 8 of cTNFRSF1A. In some embodiments, the CRISPR gene-editing system for the treatment of low back pain comprises one or more sgRNAs targeting exon 9 of cTNFRSF1A. In some embodiments, the CRISPR gene-editing system for the treatment of low back pain comprises one or more sgRNAs targeting exon 10 of cTNFRSF1A. In some embodiments, the CRISPR gene-editing system for the treatment of low back pain comprises one or more sgRNAs targeting exon 11 of cTNFRSF1A.

[0378] In some embodiments, the CRISPR gene-editing system for the treatment of low back pain comprises one or more sgRNAs targeting exon 1 of eTNFRSF1A. In some embodiments, the CRISPR gene-editing system for the treatment of low back pain comprises one or more sgRNAs targeting exon 2 of eTNFRSF1A. In some embodiments, the CRISPR gene-editing system for the treatment of low back pain comprises one or more sgRNAs targeting exon 3 of eTNFRSF1A. In some embodiments, the CRISPR gene-editing system for the treatment of low back pain comprises one or more sgRNAs targeting exon 4 of eTNFRSF1A. In some embodiments, the CRISPR gene-editing system for the treatment of low back pain comprises one or more sgRNAs targeting exon 5 of eTNFRSF1A. In some embodiments, the CRISPR gene-editing system for the treatment of low back pain comprises one or more sgRNAs targeting exon 6 of eTNFRSF1A. In some embodiments, the CRISPR gene-editing system for the treatment of low back pain comprises one or more sgRNAs targeting exon 7 of eTNFRSF1A. In some embodiments, the CRISPR gene-editing system for the treatment of low back pain comprises one or more sgRNAs targeting exon 8 of eTNFRSF1A. In some embodiments, the CRISPR gene-editing system for the treatment of low back pain comprises one or more sgRNAs targeting exon 9 of eTNFRSF1A. In some embodiments, the CRISPR gene-editing system for the treatment of low back pain comprises one or more sgRNAs targeting exon 10 of eTNFRSF1A.

[0379] In some embodiments, the CRISPR gene-editing system for the treatment of low back pain comprises one or more sgRNAs targeting exon 1 of fTNFRSF1A. In some embodiments, the CRISPR gene-editing system for the treatment of low back pain comprises one or more sgRNAs targeting exon 2 of fINFRSF1A. In some embodiments, the CRISPR gene-editing system for the treatment of low back pain comprises one or more sgRNAs targeting exon 3 of fTNFRSF1A. In some embodiments, the CRISPR gene-editing system for the treatment of low back pain comprises one or more sgRNAs targeting exon 4 of fTNFRSF1A. In some embodiments, the CRISPR gene-editing system for the treatment of low back pain comprises one or more sgRNAs targeting exon 5 of fTNFRSF1A. In some embodiments, the CRISPR gene-editing system for the treatment of low back pain comprises one or more sgRNAs targeting exon 6 of fTNFRSF1A. In some embodiments, the CRISPR gene-editing system for the treatment of low back pain comprises one or more sgRNAs targeting exon 7 of fTNFRSF1A. In some embodiments, the CRISPR gene-editing system for the treatment of low back pain comprises one or more sgRNAs targeting exon 8 of fTNFRSF1A. In some embodiments, the CRISPR gene-editing system for the treatment of low back pain comprises one or more sgRNAs targeting exon 9 of fTNFRSF1A. In some embodiments, the CRISPR gene-editing system for the treatment of low back pain comprises one or more sgRNAs targeting exon 10 of fTNFRSF1A.

[0380] In some embodiments, the CRISPR gene-editing system for the treatment of low back pain comprises one or more sgRNAs targeting TNFRSF1B. In some embodiments, the CRISPR gene-editing system for the treatment of low back pain comprises one or more sgRNAs targeting hTNFRSF1B. In some embodiments, the CRISPR gene-editing system for the treatment of low back pain comprises one or more sgRNAs targeting cTNFRSF1B. In some embodiments, the CRISPR gene-editing system for the treatment of low back pain comprises one or more sgRNAs targeting eTNFRSF1B. In some embodiments, the CRISPR gene-editing system for the treatment of low back pain comprises one or more sgRNAs targeting fTNFRSF1B.

[0381] In some embodiments, the CRISPR gene-editing system for the treatment of low back pain comprises one or more sgRNAs targeting exon 1 of hTNFRSF1B. In some embodiments, the CRISPR gene-editing system for the treatment of low back pain comprises one or more sgRNAs targeting exon 2 of hTNFRSF1B. In some embodiments, the CRISPR gene-editing system for the treatment of low back pain comprises one or more sgRNAs targeting exon 3 of hTNFRSF1B. In some embodiments, the CRISPR gene-editing system for the treatment of low back pain comprises one or more sgRNAs targeting exon 4 of hTNFRSF1B. In some embodiments, the CRISPR gene-editing system for the treatment of low back pain comprises one or more sgRNAs targeting exon 5 of hTNFRSF1B. In some embodiments, the CRISPR gene-editing system for the treatment of low back pain comprises one or more sgRNAs targeting exon 6 of hTNFRSF1B. In some embodiments, the CRISPR gene-editing system for the treatment of low back pain comprises one or more sgRNAs targeting exon 7 of hTNFRSF1B. In some embodiments, the CRISPR gene-editing system for the treatment of low back pain comprises one or more sgRNAs targeting exon 8 of hTNFRSF1B. In some embodiments, the CRISPR gene-editing system for the treatment of low back pain comprises one or more sgRNAs targeting exon 9 of hTNFRSF1B. In some embodiments, the CRISPR gene-editing system for the treatment of low back pain comprises one or more sgRNAs targeting exon 10 of hTNFRSF1B. In some embodiments, the CRISPR gene-editing system for the treatment of low back pain comprises one or more sgRNAs targeting exon 11 of hTNFRSF1B In some embodiments, the CRISPR gene-editing system for the treatment of low back pain comprises one or more sgRNAs targeting exon 12 of hTNFRSF1B. In some embodiments, the CRISPR gene-editing system for the treatment of low back pain comprises one or more sgRNAs targeting exon 13 of hTNFRSF1B.

[0382] In some embodiments, the CRISPR gene-editing system for the treatment of low back pain comprises one or more sgRNAs targeting exon 1 of cTNFRSF1B. In some embodiments, the CRISPR gene-editing system for the treatment of low back pain comprises one or more sgRNAs targeting exon 2 of cTNFRSF1B. In some embodiments, the CRISPR gene-editing system for the treatment of low back pain comprises one or more sgRNAs targeting exon 3 of cTNFRSF1B. In some embodiments, the CRISPR gene-editing system for the treatment of low back pain comprises one or more sgRNAs targeting exon 4 of cTNFRSF1B. In some embodiments, the CRISPR gene-editing system for the treatment of low back pain comprises one or more sgRNAs targeting exon 5 of cTNFRSF1B. In some embodiments, the CRISPR gene-editing system for the treatment of low back pain comprises one or more sgRNAs targeting exon 6 of cTNFRSF1B. In some embodiments, the CRISPR gene-editing system for the treatment of low back pain comprises one or more sgRNAs targeting exon 7 of cTNFRSF1B. In some embodiments, the CRISPR gene-editing system for the treatment of low back pain comprises one or more sgRNAs targeting exon 8 of CTNFRSF1B. In some embodiments, the CRISPR gene-editing system for the treatment of low back pain comprises one or more sgRNAs targeting exon 9 of cTNFRSF1B. In some embodiments, the CRISPR gene-editing system for the treatment of low back pain comprises one or more sgRNAs targeting exon 10 of cTNFRSF1B. In some embodiments, the CRISPR gene-editing system for the treatment of low back pain comprises one or more sgRNAs targeting exon 11 of cTNFRSF1B.

[0383] In some embodiments, the CRISPR gene-editing system for the treatment of low back pain comprises one or more sgRNAs targeting exon 1 of eTNFRSF1B. In some embodiments, the CRISPR gene-editing system for the treatment of low back pain comprises one or more sgRNAs targeting exon 2 of eTNFRSF1B. In some embodiments, the CRISPR gene-editing system for the treatment of low back pain comprises one or more sgRNAs targeting exon 3 of eTNFRSF1B. In some embodiments, the CRISPR gene-editing system for the treatment of low back pain comprises one or more sgRNAs targeting exon 4 of eTNFRSF1B. In some embodiments, the CRISPR gene-editing system for the treatment of low back pain comprises one or more sgRNAs targeting exon 5 of eTNFRSF1B. In some embodiments, the CRISPR gene-editing system for the treatment of low back pain comprises one or more sgRNAs targeting exon 6 of eTNFRSF1B. In some embodiments, the CRISPR gene-editing system for the treatment of low back pain comprises one or more sgRNAs targeting exon 7 of eTNFRSF1B. In some embodiments, the CRISPR gene-editing system for the treatment of low back pain comprises one or more sgRNAs targeting exon 8 of eTNFRSF1B. In some embodiments, the CRISPR gene-editing system for the treatment of low back pain comprises one or more sgRNAs targeting exon 9 of eTNFRSF1B. In some embodiments, the CRISPR gene-editing system for the treatment of low back pain comprises one or more sgRNAs targeting exon 10 of eTNFRSF1B. In some embodiments, the CRISPR gene-editing system for the treatment of low back pain comprises one or more sgRNAs targeting exon 11 of eTNFRSF1B.

[0384] In some embodiments, the CRISPR gene-editing system for the treatment of low back pain comprises one or more sgRNAs targeting exon 1 of fTNFRSF1B. In some embodiments, the CRISPR gene-editing system for the treatment of low back pain comprises one or more sgRNAs targeting exon 2 of fTNFRSF1B. In some embodiments, the CRISPR gene-editing system for the treatment of low back pain comprises one or more sgRNAs targeting exon 3 of fTNFRSF1B. In some embodiments, the CRISPR gene-editing system for the treatment of low back pain comprises one or more sgRNAs targeting exon 4 of fTNFRSF1B. In some embodiments, the CRISPR gene-editing system for the treatment of low back pain comprises one or more sgRNAs targeting exon 5 of fTNFRSF1B. In some embodiments, the CRISPR gene-editing system for the treatment of low back pain comprises one or more sgRNAs targeting exon 6 of fTNFRSF1B. In some embodiments, the CRISPR gene-editing system for the treatment of low back pain comprises one or more sgRNAs targeting exon 7 of fTNFRSF1B. In some embodiments, the CRISPR gene-editing system for the treatment of low back pain comprises one or more sgRNAs targeting exon 8 of fTNFRSF1B. In some embodiments, the CRISPR gene-editing system for the treatment of low back pain comprises one or more sgRNAs targeting exon 9 of fTNFRSF1B. In some embodiments, the CRISPR gene-editing system for the treatment of low back pain comprises one or more sgRNAs targeting exon 10 of fTNFRSF1B.

[0385] In some embodiments, the CRISPR gene-editing system for the treatment of low back pain comprises one or more sgRNAs targeting TNFRSF3. In some embodiments, the CRISPR gene-editing system for the treatment of low back pain comprises one or more sgRNAs targeting hTNFRSF3. In some embodiments, the CRISPR gene-editing system for the treatment of low back pain comprises one or more sgRNAs targeting cTNFRSF3. In some embodiments, the CRISPR gene-editing system for the treatment of low back pain comprises one or more sgRNAs targeting eTNFRSF3. In some embodiments, the CRISPR gene-editing system for the treatment of low back pain comprises one or more sgRNAs targeting fTNFRSF3.

[0386] In some embodiments, the CRISPR gene-editing system for the treatment of low back pain comprises one or more sgRNAs targeting exon 1 of hTNFRSF3. In some embodiments, the CRISPR gene-editing system for the treatment of low back pain comprises one or more sgRNAs targeting exon 2 of hTNFRSF3. In some embodiments, the CRISPR gene-editing system for the treatment of low back pain comprises one or more sgRNAs targeting exon 3 of hTNFRSF3. In some embodiments, the CRISPR gene-editing system for the treatment of low back pain comprises one or more sgRNAs targeting exon 4 of hTNFRSF3. In some embodiments, the CRISPR gene-editing system for the treatment of low back pain comprises one or more sgRNAs targeting exon 5 of hTNFRSF3. In some embodiments, the CRISPR gene-editing system for the treatment of low back pain comprises one or more sgRNAs targeting exon 6 of hTNFRSF3. In some embodiments, the CRISPR gene-editing system for the treatment of low back pain comprises one or more sgRNAs targeting exon 7 of hTNFRSF3. In some embodiments, the CRISPR gene-editing system for the treatment of low back pain comprises one or more sgRNAs targeting exon 8 of hTNFRSF3. In some embodiments, the CRISPR gene-editing system for the treatment of low back pain comprises one or more sgRNAs targeting exon 9 of hTNFRSF3. In some embodiments, the CRISPR gene-editing system for the treatment of low back pain comprises one or more sgRNAs targeting exon 10 of hTNFRSF3. In some embodiments, the CRISPR gene-editing system for the treatment of low back pain comprises one or more sgRNAs targeting exon 11 of hTNFRSF3. In some embodiments, the CRISPR gene-editing system for the treatment of low back pain comprises one or more sgRNAs targeting exon 12 of hTNFRSF3.

[0387] In some embodiments, the CRISPR gene-editing system for the treatment of low back pain comprises one or more sgRNAs targeting exon 1 of cTNFRSF3. In some embodiments, the CRISPR gene-editing system for the treatment of low back pain comprises one or more sgRNAs targeting exon 2 of cTNFRSF3. In some embodiments, the CRISPR gene-editing system for the treatment of low back pain comprises one or more sgRNAs targeting exon 3 of cTNFRSF3. In some embodiments, the CRISPR gene-editing system for the treatment of low back pain comprises one or more sgRNAs targeting exon 4 of cTNFRSF3. In some embodiments, the CRISPR gene-editing system for the treatment of low back pain comprises one or more sgRNAs targeting exon 5 of cTNFRSF3. In some embodiments, the CRISPR gene-editing system for the treatment of low back pain comprises one or more sgRNAs targeting exon 6 of cTNFRSF3. In some embodiments, the CRISPR gene-editing system for the treatment of low back pain comprises one or more sgRNAs targeting exon 7 of cTNFRSF3. In some embodiments, the CRISPR gene-editing system for the treatment of low back pain comprises one or more sgRNAs targeting exon 8 of cTNFRSF3. In some embodiments, the CRISPR gene-editing system for the treatment of low back pain comprises one or more sgRNAs targeting exon 9 of cTNFRSF3. In some embodiments, the CRISPR gene-editing system for the treatment of low back pain comprises one or more sgRNAs targeting exon 10 of cTNFRSF3.

[0388] In some embodiments, the CRISPR gene-editing system for the treatment of low back pain comprises one or more sgRNAs targeting exon 1 of eTNFRSF3. In some embodiments, the CRISPR gene-editing system for the treatment of low back pain comprises one or more sgRNAs targeting exon 2 of eTNFRSF3. In some embodiments, the CRISPR gene-editing system for the treatment of low back pain comprises one or more sgRNAs targeting exon 3 of eTNFRSF3. In some embodiments, the CRISPR gene-editing system for the treatment of low back pain comprises one or more sgRNAs targeting exon 4 of eTNFRSF3. In some embodiments, the CRISPR gene-editing system for the treatment of low back pain comprises one or more sgRNAs targeting exon 5 of eTNFRSF3. In some embodiments, the CRISPR gene-editing system for the treatment of low back pain comprises one or more sgRNAs targeting exon 6 of eTNFRSF3. In some embodiments, the CRISPR gene-editing system for the treatment of low back pain comprises one or more sgRNAs targeting exon 7 of eTNFRSF3. In some embodiments, the CRISPR gene-editing system for the treatment of low back pain comprises one or more sgRNAs targeting exon 8 of eTNFRSF3. In some embodiments, the CRISPR gene-editing system for the treatment of low back pain comprises one or more sgRNAs targeting exon 9 of eTNFRSF3. In some embodiments, the CRISPR gene-editing system for the treatment of low back pain comprises one or more sgRNAs targeting exon 10 of eTNFRSF3.

[0389] In some embodiments, the CRISPR gene-editing system for the treatment of low back pain comprises one or more sgRNAs targeting exon 1 of fTNFRSF3. In some embodiments, the CRISPR gene-editing system for the treatment of low back pain comprises one or more sgRNAs targeting exon 2 of fTNFRSF3. In some embodiments, the CRISPR gene-editing system for the treatment of low back pain comprises one or more sgRNAs targeting exon 3 of fTNFRSF3. In some embodiments, the CRISPR gene-editing system for the treatment of low back pain comprises one or more sgRNAs targeting exon 4 of fTNFRSF3. In some embodiments, the CRISPR gene-editing system for the treatment of low back pain comprises one or more sgRNAs targeting exon 5 of fTNFRSF3. In some embodiments, the CRISPR gene-editing system for the treatment of low back pain comprises one or more sgRNAs targeting exon 6 of fTNFRSF3. In some embodiments, the CRISPR gene-editing system for the treatment of low back pain comprises one or more sgRNAs targeting exon 7 of fTNFRSF3. In some embodiments, the CRISPR gene-editing system for the treatment of low back pain comprises one or more sgRNAs targeting exon 8 of fTNFRSF3. In some embodiments, the CRISPR gene-editing system for the treatment of low back pain comprises one or more sgRNAs targeting exon 9 of fTNFRSF3. In some embodiments, the CRISPR gene-editing system for the treatment of low back pain comprises one or more sgRNAs targeting exon 10 of fTNFRSF3.

[0390] In some embodiments, the CRISPR gene-editing system for the treatment of low back pain comprises one or more sgRNAs targeting TNFRSF4. In some embodiments, the CRISPR gene-editing system for the treatment of low back pain comprises one or more sgRNAs targeting hTNFRSF4. In some embodiments, the CRISPR gene-editing system for the treatment of low back pain comprises one or more sgRNAs targeting cTNFRSF4. In some embodiments, the CRISPR gene-editing system for the treatment of low back pain comprises one or more sgRNAs targeting eTNFRSF4. In some embodiments, the CRISPR gene-editing system for the treatment of low back pain comprises one or more sgRNAs targeting fTNFRSF4.

[0391] In some embodiments, the CRISPR gene-editing system for the treatment of low back pain comprises one or more sgRNAs targeting exon 1 of hTNFRSF4. In some embodiments, the CRISPR gene-editing system for the treatment of low back pain comprises one or more sgRNAs targeting exon 2 of hTNFRSF4. In some embodiments, the CRISPR gene-editing system for the treatment of low back pain comprises one or more sgRNAs targeting exon 3 of hTNFRSF4. In some embodiments, the CRISPR gene-editing system for the treatment of low back pain comprises one or more sgRNAs targeting exon 4 of hTNFRSF4. In some embodiments, the CRISPR gene-editing system for the treatment of low back pain comprises one or more sgRNAs targeting exon 5 of hTNFRSF4. In some embodiments, the CRISPR gene-editing system for the treatment of low back pain comprises one or more sgRNAs targeting exon 6 of hTNFRSF4.

[0392] In some embodiments, the CRISPR gene-editing system for the treatment of low back pain comprises one or more sgRNAs targeting exon 1 of cTNFRSF4. In some embodiments, the CRISPR gene-editing system for the treatment of low back pain comprises one or more sgRNAs targeting exon 2 of cTNFRSF4. In some embodiments, the CRISPR gene-editing system for the treatment of low back pain comprises one or more sgRNAs targeting exon 3 of cTNFRSF4. In some embodiments, the CRISPR gene-editing system for the treatment of low back pain comprises one or more sgRNAs targeting exon 4 of cTNFRSF4. In some embodiments, the CRISPR gene-editing system for the treatment of low back pain comprises one or more sgRNAs targeting exon 5 of cTNFRSF4. In some embodiments, the CRISPR gene-editing system for the treatment of low back pain comprises one or more sgRNAs targeting exon 6 of cTNFRSF4. In some embodiments, the CRISPR gene-editing system for the treatment of low back pain comprises one or more sgRNAs targeting exon 7 of cTNFRSF4.

[0393] In some embodiments, the CRISPR gene-editing system for the treatment of low back pain comprises one or more sgRNAs targeting exon 1 of eTNFRSF4. In some embodiments, the CRISPR gene-editing system for the treatment of low back pain comprises one or more sgRNAs targeting exon 2 of eTNFRSF4. In some embodiments, the CRISPR gene-editing system for the treatment of low back pain comprises one or more sgRNAs targeting exon 3 of eTNFRSF4. In some embodiments, the CRISPR gene-editing system for the treatment of low back pain comprises one or more sgRNAs targeting exon 4 of eTNFRSF4. In some embodiments, the CRISPR gene-editing system for the treatment of low back pain comprises one or more sgRNAs targeting exon 5 of eTNFRSF4. In some embodiments, the CRISPR gene-editing system for the treatment of low back pain comprises one or more sgRNAs targeting exon 6 of eTNFRSF4. In some embodiments, the CRISPR gene-editing system for the treatment of low back pain comprises one or more sgRNAs targeting exon 7 of eTNFRSF4.

[0394] In some embodiments, the CRISPR gene-editing system for the treatment of low back pain comprises one or more sgRNAs targeting exon 1 of fTNFRSF4. In some embodiments, the CRISPR gene-editing system for the treatment of low back pain comprises one or more sgRNAs targeting exon 2 of fTNFRSF4. In some embodiments, the CRISPR gene-editing system for the treatment of low back pain comprises one or more sgRNAs targeting exon 3 of fTNFRSF4. In some embodiments, the CRISPR gene-editing system for the treatment of low back pain comprises one or more sgRNAs targeting exon 4 of fTNFRSF4. In some embodiments, the CRISPR gene-editing system for the treatment of low back pain comprises one or more sgRNAs targeting exon 5 of fTNFRSF4. In some embodiments, the CRISPR gene-editing system for the treatment of low back pain comprises one or more sgRNAs targeting exon 6 of fTNFRSF4. In some embodiments, the CRISPR gene-editing system for the treatment of low back pain comprises one or more sgRNAs targeting exon 7 of fTNFRSF4.

[0395] In some embodiments, the CRISPR gene-editing system for the treatment of low back pain comprises one or more sgRNAs targeting TNFRSF11A. In some embodiments, the CRISPR gene-editing system for the treatment of low back pain comprises one or more sgRNAs targeting hTNFRSF11A. In some embodiments, the CRISPR gene-editing system for the treatment of low back pain comprises one or more sgRNAs targeting cTNFRSF11A. In some embodiments, the CRISPR gene-editing system for the treatment of low back pain comprises one or more sgRNAs targeting eTNFRSF11A. In some embodiments, the CRISPR gene-editing system for the treatment of low back pain comprises one or more sgRNAs targeting fTNFRSF11A.

[0396] In some embodiments, the CRISPR gene-editing system for the treatment of low back pain comprises one or more sgRNAs targeting exon 1 of hTNFRSF11A. In some embodiments, the CRISPR gene-editing system for the treatment of low back pain comprises one or more sgRNAs targeting exon 2 of hTNFRSF11A. In some embodiments, the CRISPR gene-editing system for the treatment of low back pain comprises one or more sgRNAs targeting exon 3 of hTNFRSF11A. In some embodiments, the CRISPR gene-editing system for the treatment of low back pain comprises one or more sgRNAs targeting exon 4 of hTNFRSF11A. In some embodiments, the CRISPR gene-editing system for the treatment of low back pain comprises one or more sgRNAs targeting exon 5 of hTNFRSF11A. In some embodiments, the CRISPR gene-editing system for the treatment of low back pain comprises one or more sgRNAs targeting exon 6 of hTNFRSF11A. In some embodiments, the CRISPR gene-editing system for the treatment of low back pain comprises one or more sgRNAs targeting exon 7 of hTNFRSF11A. In some embodiments, the CRISPR gene-editing system for the treatment of low back pain comprises one or more sgRNAs targeting exon 8 of hTNFRSF11A. In some embodiments, the CRISPR gene-editing system for the treatment of low back pain comprises one or more sgRNAs targeting exon 9 of hTNFRSF11A. In some embodiments, the CRISPR gene-editing system for the treatment of low back pain comprises one or more sgRNAs targeting exon 10 of hTNFRSF11A. In some embodiments, the CRISPR gene-editing system for the treatment of low back pain comprises one or more sgRNAs targeting exon 11 of hTNFRSF11A. In some embodiments, the CRISPR gene-editing system for the treatment of low back pain comprises one or more sgRNAs targeting exon 12 of hTNFRSF11A.

[0397] In some embodiments, the CRISPR gene-editing system for the treatment of low back pain comprises one or more sgRNAs targeting exon 1 of cTNFRSF11A. In some embodiments, the CRISPR gene-editing system for the treatment of low back pain comprises one or more sgRNAs targeting exon 2 of cTNFRSF11A. In some embodiments, the CRISPR gene-editing system for the treatment of low back pain comprises one or more sgRNAs targeting exon 3 of cTNFRSF11A. In some embodiments, the CRISPR gene-editing system for the treatment of low back pain comprises one or more sgRNAs targeting exon 4 of cTNFRSF11A. In some embodiments, the CRISPR gene-editing system for the treatment of low back pain comprises one or more sgRNAs targeting exon 5 of cTNFRSF11A. In some embodiments, the CRISPR gene-editing system for the treatment of low back pain comprises one or more sgRNAs targeting exon 6 of cTNFRSF11A. In some embodiments, the CRISPR gene-editing system for the treatment of low back pain comprises one or more sgRNAs targeting exon 7 of cTNFRSF11A. In some embodiments, the CRISPR gene-editing system for the treatment of low back pain comprises one or more sgRNAs targeting exon 8 of cTNFRSF11A. In some embodiments, the CRISPR gene-editing system for the treatment of low back pain comprises one or more sgRNAs targeting exon 9 of cTNFRSF11A. In some embodiments, the CRISPR gene-editing system for the treatment of low back pain comprises one or more sgRNAs targeting exon 10 of cTNFRSF11A. In some embodiments, the CRISPR gene-editing system for the treatment of low back pain comprises one or more sgRNAs targeting exon 11 of cTNFRSF11A.

[0398] In some embodiments, the CRISPR gene-editing system for the treatment of low back pain comprises one or more sgRNAs targeting exon 1 of eTNFRSF11A. In some embodiments, the CRISPR gene-editing system for the treatment of low back pain comprises one or more sgRNAs targeting exon 2 of eTNFRSF11A. In some embodiments, the CRISPR gene-editing system for the treatment of low back pain comprises one or more sgRNAs targeting exon 3 of eTNFRSF11A. In some embodiments, the CRISPR gene-editing system for the treatment of low back pain comprises one or more sgRNAs targeting exon 4 of eTNFRSF11A. In some embodiments, the CRISPR gene-editing system for the treatment of low back pain comprises one or more sgRNAs targeting exon 5 of eTNFRSF11A. In some embodiments, the CRISPR gene-editing system for the treatment of low back pain comprises one or more sgRNAs targeting exon 6 of eTNFRSF11A. In some embodiments, the CRISPR gene-editing system for the treatment of low back pain comprises one or more sgRNAs targeting exon 7 of eTNFRSF11A. In some embodiments, the CRISPR gene-editing system for the treatment of low back pain comprises one or more sgRNAs targeting exon 8 of eTNFRSF11A. In some embodiments, the CRISPR gene-editing system for the treatment of low back pain comprises one or more sgRNAs targeting exon 9 of eTNFRSF11A. In some embodiments, the CRISPR gene-editing system for the treatment of low back pain comprises one or more sgRNAs targeting exon 10 of eTNFRSF11A.

[0399] In some embodiments, the CRISPR gene-editing system for the treatment of low back pain comprises one or more sgRNAs targeting exon 1 of fTNFRSF11A. In some embodiments, the CRISPR gene-editing system for the treatment of low back pain comprises one or more sgRNAs targeting exon 2 of fTNFRSF11A. In some embodiments, the CRISPR gene-editing system for the treatment of low back pain comprises one or more sgRNAs targeting exon 3 of fTNFRSF11A. In some embodiments, the CRISPR gene-editing system for the treatment of low back pain comprises one or more sgRNAs targeting exon 4 of fTNFRSF11A. In some embodiments, the CRISPR gene-editing system for the treatment of low back pain comprises one or more sgRNAs targeting exon 5 of fTNFRSF11A. In some embodiments, the CRISPR gene-editing system for the treatment of low back pain comprises one or more sgRNAs targeting exon 6 of fTNFRSF11A. In some embodiments, the CRISPR gene-editing system for the treatment of low back pain comprises one or more sgRNAs targeting exon 7 of fTNFRSF11A. In some embodiments, the CRISPR gene-editing system for the treatment of low back pain comprises one or more sgRNAs targeting exon 8 of fTNFRSF11A. In some embodiments, the CRISPR gene-editing system for the treatment of low back pain comprises one or more sgRNAs targeting exon 9 of fTNFRSF11A. In some embodiments, the CRISPR gene-editing system for the treatment of low back pain comprises one or more sgRNAs targeting exon 10 of fTNFRSF11A. In some embodiments, the CRISPR gene-editing system for the treatment of low back pain comprises one or more sgRNAs targeting exon 11 of fTNFRSF11A.

### C. DDD

[0400] In one aspect, the present disclosure encompasses treatments for degenerative disc disorder (DDD). In some embodiments, the DDD treatment comprises a therapeutically effective amount of a Clustered Regularly Interspaced Short Palindromic Repeats (CRISPR) gene-editing system, the system comprising: (i) a CRISPR Associated (Cas) protein; and (ii) at least one guide RNA targeting IL1R1. In some embodiments, the DDD treatment comprises a CRISPR gene-editing system targeting hIL1R1. In some embodiments, the DDD treatment comprises a CRISPR gene-editing system targeting cIL1R1. In some embodiments, the DDD treatment comprises a CRISP gene-editing system R targeting eIL1R1. In some embodiments, the DDD treatment comprises a CRISPR gene-editing system targeting fIL1R1.

[0401] In some embodiments, the CRISPR gene-editing system for the treatment of DDD comprises one or more sgRNAs targeting exon 1 of hIL1R1. In some embodiments, the CRISPR gene-editing system for the treatment of DDD comprises one or more sgRNAs targeting exon 2 of hIL1R1. In some embodiments, the CRISPR gene-editing system for the treatment of DDD comprises one or more sgRNAs targeting exon 3 of hIL1R1. In some embodiments, the CRISPR gene-editing system for the treatment of DDD comprises one or more sgRNAs targeting exon 4 of hIL1R1. In some embodiments, the CRISPR gene-editing system for the treatment of DDD comprises one or more sgRNAs targeting exon 5 of hIL1R1. In some embodiments, the CRISPR gene-editing system for the treatment of DDD comprises one or more sgRNAs targeting exon 6 of hIL1R1. In some embodiments, the CRISPR gene-editing system for the treatment of DDD comprises one or more sgRNAs targeting exon 7 of hIL1R1. In some embodiments, the CRISPR gene-editing system for the treatment of DDD comprises one or more sgRNAs targeting exon 8 of hIL1R1. In some embodiments, the CRISPR gene-editing system for the treatment of DDD comprises one or more sgRNAs targeting exon 9 of hIL1R1. In some embodiments, the CRISPR gene-editing system for the treatment of DDD comprises one or more sgRNAs targeting exon 10 of hIL1R1. In some embodiments, the CRISPR gene-editing system for the treatment of DDD comprises one or more sgRNAs targeting exon 11 of hIL1R1. In some embodiments, the CRISPR gene-editing system for the treatment of DDD comprises one or more sgRNAs targeting exon 12 of hIL1R1. In some embodiments, the CRISPR gene-editing system for the treatment of DDD comprises one or more sgRNAs targeting exon 13 of hIL1R1. In some embodiments, the CRISPR gene-editing system for the treatment of DDD comprises one or more sgRNAs targeting exon 14 of hIL1R1. In some embodiments, the CRISPR gene-editing system for the treatment of DDD comprises one or more sgRNAs targeting exon 15 of hIL1R1. In some embodiments, the CRISPR gene-editing system for the treatment of DDD comprises one or more sgRNAs targeting exon 16 of hIL1R1. In some embodiments, the CRISPR gene-editing system for the treatment of DDD comprises one or more sgRNAs targeting exon 17 of hIL1R1. In some embodiments, the CRISPR gene-editing system for the treatment of DDD comprises one or more sgRNAs targeting exon 18 of hIL1R1. In some embodiments, the CRISPR gene-editing system for the treatment of DDD comprises one or more sgRNAs targeting exon 19 of hIL1R1. In some embodiments, the CRISPR gene-editing system for the treatment of DDD comprises one or more sgRNAs targeting exon 20 of hIL1R1. In some embodiments, the CRISPR gene-editing system for the treatment of DDD comprises one or more sgRNAs targeting exon 21 of hIL1R1.

[0402] In some embodiments, the CRISPR gene-editing system for the treatment of DDD comprises one or more sgRNAs targeting exon 1 of cIL1R1. In some embodiments, the CRISPR gene-editing system for the treatment of DDD comprises one or more sgRNAs targeting exon 2 of cIL1R1. In some embodiments, the CRISPR gene-editing system for the treatment of DDD comprises one or more sgRNAs targeting exon 3 of cIL1R1. In some embodiments, the CRISPR gene-editing system for the treatment of DDD comprises one or more sgRNAs targeting exon 4 of cIL1R1. In some embodiments, the CRISPR gene-editing system for the treatment of DDD comprises one or more sgRNAs targeting exon 5 of cIL1R1. In some embodiments, the CRISPR gene-editing system for the treatment of DDD comprises one or more sgRNAs targeting exon 6 of cIL1R1. In some embodiments, the CRISPR gene-editing system for the treatment of DDD comprises one or more sgRNAs targeting exon 7 of cIL1R1. In some embodiments, the CRISPR gene-editing system for the treatment of DDD comprises one or more sgRNAs targeting exon 8 of cIL1R1. In some embodiments, the CRISPR gene-editing system for the treatment of DDD comprises one or more sgRNAs targeting exon 9 of cIL1R1. In some embodiments, the CRISPR gene-editing system for the treatment of DDD comprises one or more sgRNAs targeting exon 10 of cIL1R1. In some embodiments, the CRISPR gene-editing system for the treatment of DDD comprises one or more sgRNAs targeting exon 11 of cIL1R1. In some embodiments, the CRISPR gene-editing system for the treatment of DDD comprises one or more sgRNAs targeting exon 12 of cIL1R1. In some embodiments, the CRISPR gene-editing system for the treatment of DDD comprises one or more sgRNAs targeting exon 13 of cIL1R1. In some embodiments, the CRISPR gene-editing system for the treatment of DDD comprises one or more sgRNAs targeting exon 14 of cIL1R1. In some embodiments, the CRISPR gene-editing system for the treatment of DDD comprises one or more sgRNAs targeting exon 15 of cIL1R1. In some embodiments, the CRISPR gene-editing system for the treatment of DDD comprises one or more sgRNAs targeting exon 16 of cIL1R1.

[0403] In some embodiments, the CRISPR gene-editing system for the treatment of DDD comprises one or more sgRNAs targeting exon 1 of eIL1R1. In some embodiments, the CRISPR gene-editing system for the treatment of DDD comprises one or more sgRNAs targeting exon 2 of eIL1R1. In some embodiments, the CRISPR gene-editing system for the treatment of DDD comprises one or more sgRNAs targeting exon 3 of eIL1R1. In some embodiments, the CRISPR gene-editing system for the treatment of DDD comprises one or more sgRNAs targeting exon 4 of eIL1R1. In some embodiments, the CRISPR gene-editing system for the treatment of DDD comprises one or more sgRNAs targeting exon 5 of eIL1R1. In some embodiments, the CRISPR gene-editing system for the treatment of DDD comprises one or more sgRNAs targeting exon 6 of eIL1R1. In some embodiments, the CRISPR gene-editing system for the treatment of DDD comprises one or more sgRNAs targeting exon 7 of eIL1R1. In some embodiments, the CRISPR gene-editing system for the treatment of DDD comprises one or more sgRNAs targeting exon 8 of eIL1R1. In some embodiments, the CRISPR gene-editing system for the treatment of DDD comprises one or more sgRNAs targeting exon 9 of eIL1R1. In some embodiments, the CRISPR gene-editing system for the treatment of DDD comprises one or more sgRNAs targeting exon 10 of eIL1R1. In some embodiments, the CRISPR gene-editing system for the treatment of DDD comprises one or more sgRNAs targeting exon 11 of eIL1R1. In some embodiments, the CRISPR gene-editing system for the treatment of DDD comprises one or more sgRNAs targeting exon 12 of eIL1R1. In some embodiments, the CRISPR gene-editing system for the treatment of DDD comprises one or more sgRNAs targeting exon 13 of eIL1R1. In some embodiments, the CRISPR gene-editing system for the treatment of DDD comprises one or more sgRNAs targeting exon 14 of eIL1R1. In some embodiments, the CRISPR gene-editing system for the treatment of DDD comprises one or more sgRNAs targeting exon 15 of eIL1R1.

[0404] In some embodiments, the CRISPR gene-editing system for the treatment of DDD comprises one or more sgRNAs targeting exon 1 of fIL1R1. In some embodiments, the CRISPR gene-editing system for the treatment of DDD comprises one or more sgRNAs targeting exon 2 of fIL1R1. In some embodiments, the CRISPR gene-editing system for the treatment of DDD comprises one or more sgRNAs targeting exon 3 of fIL1R1. In some embodiments, the CRISPR gene-editing system for the treatment of DDD comprises one or more sgRNAs targeting exon 4 of fIL1R1. In some embodiments, the CRISPR gene-editing system for the treatment of DDD comprises one or more sgRNAs targeting exon 5 of fIL1R1. In some embodiments, the CRISPR gene-editing system for the treatment of DDD comprises one or more sgRNAs targeting exon 6 of fIL1R1. In some embodiments, the CRISPR gene-editing system for the treatment of DDD comprises one or more sgRNAs targeting exon 7 of fIL1R1. In some embodiments, the CRISPR gene-editing system for the treatment of DDD comprises one or more sgRNAs targeting exon 8 of fIL1R1. In some embodiments, the CRISPR gene-editing system for the treatment of DDD comprises one or more sgRNAs targeting exon 9 of fIL1R1. In some embodiments, the CRISPR gene-editing system for the treatment of DDD comprises one or more sgRNAs targeting exon 10 of fIL1R1. In some embodiments, the CRISPR gene-editing system for the treatment of DDD comprises one or more sgRNAs targeting exon 11 of fIL1R1. In some embodiments, the CRISPR gene-editing system for the treatment of DDD comprises one or more sgRNAs targeting exon 12 of fIL1R1. In some embodiments, the CRISPR gene-editing system for the treatment of DDD comprises one or more sgRNAs targeting exon 13 of fIL1R1. In some embodiments, the CRISPR gene-editing system for the treatment of DDD comprises one or more sgRNAs targeting exon 14 of fIL1R1. In some embodiments, the CRISPR gene-editing system for the treatment of DDD comprises one or more sgRNAs targeting exon 15 of fIL1R1. In some embodiments, the CRISPR gene-editing system for the treatment of DDD comprises one or more sgRNAs targeting exon 16 of fIL1R1. In some embodiments, the CRISPR gene-editing system for the treatment of DDD comprises one or more sgRNAs targeting exon 17 of fIL1R1. In some embodiments, the CRISPR gene-editing system for the treatment of DDD comprises one or more sgRNAs targeting exon 18 of fIL1R1.

[0405] In some embodiments, the CRISPR gene-editing system for the treatment of DDD comprises one or more sgRNAs targeting IL1RAP. In some embodiments, the CRISPR gene-editing system for the treatment of DDD comprises one or more sgRNAs targeting hIL1RAP. In some embodiments, the CRISPR gene-editing system for the treatment of DDD comprises one or more sgRNAs targeting cIL1RAP. In some embodiments, the CRISPR gene-editing system for the treatment of DDD comprises one or more sgRNAs targeting eIL1RAP. In some embodiments, the CRISPR gene-editing system for the treatment of DDD comprises one or more sgRNAs targeting fIL1RAP.

[0406] In some embodiments, the CRISPR gene-editing system for the treatment of DDD comprises one or more sgRNAs targeting exon 1 of hIL1RAP. In some embodiments, the CRISPR gene-editing system for the treatment of DDD comprises one or more sgRNAs targeting exon 2 of hIL1RAP. In some embodiments, the CRISPR gene-editing system for the treatment of DDD comprises one or more sgRNAs targeting exon 3 of hIL1RAP. In some embodiments, the CRISPR gene-editing system for the treatment of DDD comprises one or more sgRNAs targeting exon 4 of hIL1RAP. In some embodiments, the CRISPR gene-editing system for the treatment of DDD comprises one or more sgRNAs targeting exon 5 of hIL1RAP. In some embodiments, the CRISPR gene-editing system for the treatment of DDD comprises one or more sgRNAs targeting exon 6 of hIL1RAP. In some embodiments, the CRISPR gene-editing system for the treatment of DDD comprises one or more sgRNAs targeting exon 7 of hIL1RAP. In some embodiments, the CRISPR gene-editing system for the treatment of DDD comprises one or more sgRNAs targeting exon 8 of hIL1RAP. In some embodiments, the CRISPR gene-editing system for the treatment of DDD comprises one or more sgRNAs targeting exon 9 of hIL1RAP. In some embodiments, the CRISPR gene-editing system for the treatment of DDD comprises one or more sgRNAs targeting exon 10 of hIL1RAP. In some embodiments, the CRISPR gene-editing system for the treatment of DDD comprises one or more sgRNAs targeting exon 11 of hIL1RAP. In some embodiments, the CRISPR gene-editing system for the treatment of DDD comprises one or more sgRNAs targeting exon 12 of hIL1RAP. In some embodiments, the CRISPR gene-editing system for the treatment of DDD comprises one or more sgRNAs targeting exon 13 of hIL1RAP. In some embodiments, the CRISPR gene-editing system for the treatment of DDD comprises one or more sgRNAs targeting exon 14 of hIL1RAP. In some embodiments, the CRISPR gene-editing system for the treatment of DDD comprises one or more sgRNAs targeting exon 15 of hIL1RAP. In some embodiments, the CRISPR gene-editing system for the treatment of DDD comprises one or more sgRNAs targeting exon 16 of hIL1RAP. In some embodiments, the CRISPR gene-editing system for the treatment of DDD comprises one or more sgRNAs targeting exon 17 of hIL1RAP.

[0407] In some embodiments, the CRISPR gene-editing system for the treatment of DDD comprises one or more sgRNAs targeting exon 1 of cIL1RAP. In some embodiments, the CRISPR gene-editing system for the treatment of DDD comprises one or more sgRNAs targeting exon 2 of cIL1RAP. In some embodiments, the CRISPR gene-editing system for the treatment of DDD comprises one or more sgRNAs targeting exon 3 of cIL1RAP. In some embodiments, the CRISPR gene-editing system for the treatment of DDD comprises one or more sgRNAs targeting exon 4 of cIL1RAP. In some embodiments, the CRISPR gene-editing system for the treatment of DDD comprises one or more sgRNAs targeting exon 5 of cIL1RAP. In some embodiments, the CRISPR gene-editing system for the treatment of DDD comprises one or more sgRNAs targeting exon 6 of cIL1RAP. In some embodiments, the CRISPR gene-editing system for the treatment of DDD comprises one or more sgRNAs targeting exon 7 of cIL1RAP. In some embodiments, the CRISPR gene-editing system for the treatment of DDD comprises one or more sgRNAs targeting exon 8 of cIL1RAP. In some embodiments, the CRISPR gene-editing system for the treatment of DDD comprises one or more sgRNAs targeting exon 9 of cIL1RAP. In some embodiments, the CRISPR gene-editing system for the treatment of DDD comprises one or more sgRNAs targeting exon 10 of cIL1RAP. In some embodiments, the CRISPR gene-editing system for the treatment of DDD comprises one or more sgRNAs targeting exon 11 of cIL1RAP. In some embodiments, the CRISPR gene-editing system for the treatment of DDD comprises one or more sgRNAs targeting exon 12 of cIL1RAP. In some embodiments, the CRISPR gene-editing system for the treatment of DDD comprises one or more sgRNAs targeting exon 13 of cIL1RAP. In some embodiments, the CRISPR gene-editing system for the treatment of DDD comprises one or more sgRNAs targeting exon 14 of cIL1RAP. In some embodiments, the CRISPR gene-editing system for the treatment of DDD comprises one or more sgRNAs targeting exon 15 of cIL1RAP. In some embodiments, the CRISPR gene-editing system for the treatment of DDD comprises one or more sgRNAs targeting exon 16 of cIL1RAP.

[0408] In some embodiments, the CRISPR gene-editing system for the treatment of DDD comprises one or more sgRNAs targeting exon 1 of eIL1RAP. In some embodiments, the CRISPR gene-editing system for the treatment of DDD comprises one or more sgRNAs targeting exon 2 of eIL1RAP. In some embodiments, the CRISPR gene-editing system for the treatment of DDD comprises one or more sgRNAs targeting exon 3 of eIL1RAP. In some embodiments, the CRISPR gene-editing system for the treatment of DDD comprises one or more sgRNAs targeting exon 4 of eIL1RAP. In some embodiments, the CRISPR gene-editing system for the treatment of DDD comprises one or more sgRNAs targeting exon 5 of eIL1RAP. In some embodiments, the CRISPR gene-editing system for the treatment of DDD comprises one or more sgRNAs targeting exon 6 of eIL1RAP. In some embodiments, the CRISPR gene-editing system for the treatment of DDD comprises one or more sgRNAs targeting exon 7 of eIL1RAP. In some embodiments, the CRISPR gene-editing system for the treatment of DDD comprises one or more sgRNAs targeting exon 8 of eIL1RAP. In some embodiments, the CRISPR gene-editing system for the treatment of DDD comprises one or more sgRNAs targeting exon 9 of eIL1RAP. In some embodiments, the CRISPR gene-editing system for the treatment of DDD comprises one or more sgRNAs targeting exon 10 of eIL1RAP. In some embodiments, the CRISPR gene-editing system for the treatment of DDD comprises one or more sgRNAs targeting exon 11 of eIL1RAP. In some embodiments, the CRISPR gene-editing system for the treatment of DDD comprises one or more sgRNAs targeting exon 12 of eIL1RAP. In some embodiments, the CRISPR gene-editing system for the treatment of DDD comprises one or more sgRNAs targeting exon 13 of eIL1RAP.

[0409] In some embodiments, the CRISPR gene-editing system for the treatment of DDD comprises one or more sgRNAs targeting exon 1 of fIL1RAP. In some embodiments, the CRISPR gene-editing system for the treatment of DDD comprises one or more sgRNAs targeting exon 2 of fIL1RAP. In some embodiments, the CRISPR gene-editing system for the treatment of DDD comprises one or more sgRNAs targeting exon 3 of fIL1RAP. In some embodiments, the CRISPR gene-editing system for the treatment of DDD comprises one or more sgRNAs targeting exon 4 of fIL1RAP. In some embodiments, the CRISPR gene-editing system for the treatment of DDD comprises one or more sgRNAs targeting exon 5 of fIL1RAP. In some embodiments, the CRISPR gene-editing system for the treatment of DDD comprises one or more sgRNAs targeting exon 6 of fIL1RAP. In some embodiments, the CRISPR gene-editing system for the treatment of DDD comprises one or more sgRNAs targeting exon 7 of fIL1RAP. In some embodiments, the CRISPR gene-editing system for the treatment of DDD comprises one or more sgRNAs targeting exon 8 of fIL1RAP. In some embodiments, the CRISPR gene-editing system for the treatment of DDD comprises one or more sgRNAs targeting exon 9 of fIL1RAP. In some embodiments, the CRISPR gene-editing system for the treatment of DDD comprises one or more sgRNAs targeting exon 10 of fIL1RAP. In some embodiments, the CRISPR gene-editing system for the treatment of DDD comprises one or more sgRNAs targeting exon 11 of fIL1RAP. In some embodiments, the CRISPR gene-editing system for the treatment of DDD comprises one or more sgRNAs targeting exon 12 of fIL1RAP. In some embodiments, the CRISPR gene-editing system for the treatment of DDD comprises one or more sgRNAs targeting exon 13 of fIL1RAP. In some embodiments, the CRISPR gene-editing system for the treatment of DDD comprises one or more sgRNAs targeting exon 14 of fIL1RAP.

[0410] In some embodiments, the CRISPR gene-editing system for the treatment of DDD comprises one or more sgRNAs targeting TGFBR1. In some embodiments, the CRISPR gene-editing system for the treatment of DDD comprises one or more sgRNAs targeting hTGFBR1. In some embodiments, the CRISPR gene-editing system for the treatment of DDD comprises one or more sgRNAs targeting cTGFBR1. In some embodiments, the CRISPR gene-editing system for the treatment of DDD comprises one or more sgRNAs targeting e TGFBR1. In some embodiments, the CRISPR gene-editing system for the treatment of DDD comprises one or more sgRNAs targeting fTGFBR1.

[0411] In some embodiments, the CRISPR gene-editing system for the treatment of DDD comprises one or more sgRNAs targeting exon 1 of hTGFBR1. In some embodiments, the CRISPR gene-editing system for the treatment of DDD comprises one or more sgRNAs targeting exon 2 of hTGFBR1. In some embodiments, the CRISPR gene-editing system for the treatment of DDD comprises one or more sgRNAs targeting exon 3 of hTGFBR1. In some embodiments, the CRISPR gene-editing system for the treatment of DDD comprises one or more sgRNAs targeting exon 4 of hTGFBR1. In some embodiments, the CRISPR gene-editing system for the treatment of DDD comprises one or more sgRNAs targeting exon 5 of hTGFBR1. In some embodiments, the CRISPR gene-editing system for the treatment of DDD comprises one or more sgRNAs targeting exon 6 of hTGFBR1. In some embodiments, the CRISPR gene-editing system for the treatment of DDD comprises one or more sgRNAs targeting exon 7 of hTGFBR1. In some embodiments, the CRISPR gene-editing system for the treatment of DDD comprises one or more sgRNAs targeting exon 8 of hTGFBR1. In some embodiments, the CRISPR gene-editing system for the treatment of DDD comprises one or more sgRNAs targeting exon 9 of hTGFBR1. In some embodiments, the CRISPR gene-editing system for the treatment of DDD comprises one or more sgRNAs targeting exon 10 of hTGFBR1. In some embodiments, the CRISPR gene-editing system for the treatment of DDD comprises one or more sgRNAs targeting exon 11 of hTGFBR1.

[0412] In some embodiments, the CRISPR gene-editing system for the treatment of DDD comprises one or more sgRNAs targeting exon 1 of cTGFBR1. In some embodiments, the CRISPR gene-editing system for the treatment of DDD comprises one or more sgRNAs targeting exon 2 of cTGFBR1. In some embodiments, the CRISPR gene-editing system for the treatment of DDD comprises one or more sgRNAs targeting exon 3 of cTGFBR1. In some embodiments, the CRISPR gene-editing system for the treatment of DDD comprises one or more sgRNAs targeting exon 4 of cTGFBR1. In some embodiments, the CRISPR gene-editing system for the treatment of DDD comprises one or more sgRNAs targeting exon 5 of cTGFBR1. In some embodiments, the CRISPR gene-editing system for the treatment of DDD comprises one or more sgRNAs targeting exon 6 of cTGFBR1. In some embodiments, the CRISPR gene-editing system for the treatment of DDD comprises one or more sgRNAs targeting exon 7 of cTGFBR1. In some embodiments, the CRISPR gene-editing system for the treatment of DDD comprises one or more sgRNAs targeting exon 8 of cTGFBR1. In some embodiments, the CRISPR gene-editing system for the treatment of DDD comprises one or more sgRNAs targeting exon 9 of cTGFBR1.

[0413] In some embodiments, the CRISPR gene-editing system for the treatment of DDD comprises one or more sgRNAs targeting exon 1 of eTGFBR1. In some embodiments, the CRISPR gene-editing system for the treatment of DDD comprises one or more sgRNAs targeting exon 2 of eTGFBR1. In some embodiments, the CRISPR gene-editing system for the treatment of DDD comprises one or more sgRNAs targeting exon 3 of eTGFBR1. In some embodiments, the CRISPR gene-editing system for the treatment of DDD comprises one or more sgRNAs targeting exon 4 of eTGFBR1. In some embodiments, the CRISPR gene-editing system for the treatment of DDD comprises one or more sgRNAs targeting exon 5 of eTGFBR1. In some embodiments, the CRISPR gene-editing system for the treatment of DDD comprises one or more sgRNAs targeting exon 6 of eTGFBR1. In some embodiments, the CRISPR gene-editing system for the treatment of DDD comprises one or more sgRNAs targeting exon 7 of eTGFBR1. In some embodiments, the CRISPR gene-editing system for the treatment of DDD comprises one or more sgRNAs targeting exon 8 of eTGFBR1. In some embodiments, the CRISPR gene-editing system for the treatment of DDD comprises one or more sgRNAs targeting exon 9 of eTGFBR1. In some embodiments, the CRISPR gene-editing system for the treatment of DDD comprises one or more sgRNAs targeting exon 10 of eTGFBR1. In some embodiments, the CRISPR gene-editing system for the treatment of DDD comprises one or more sgRNAs targeting exon 11 of eTGFBR1. In some embodiments, the CRISPR gene-editing system for the treatment of DDD comprises one or more sgRNAs targeting exon 12 of eTGFBR1.

[0414] In some embodiments, the CRISPR gene-editing system for the treatment of DDD comprises one or more sgRNAs targeting exon 1 of fTGFBR1. In some embodiments, the CRISPR gene-editing system for the treatment of DDD comprises one or more sgRNAs targeting exon 2 of fTGFBR1. In some embodiments, the CRISPR gene-editing system for the treatment of DDD comprises one or more sgRNAs targeting exon 3 of fTGFBR1. In some embodiments, the CRISPR gene-editing system for the treatment of DDD comprises one or more sgRNAs targeting exon 4 of fTGFBR1. In some embodiments, the CRISPR gene-editing system for the treatment of DDD comprises one or more sgRNAs targeting exon 5 of fTGFBR1. In some embodiments, the CRISPR gene-editing system for the treatment of DDD comprises one or more sgRNAs targeting exon 6 of fTGFBR1. In some embodiments, the CRISPR gene-editing system for the treatment of DDD comprises one or more sgRNAs targeting exon 7 of fTGFBR1. In some embodiments, the CRISPR gene-editing system for the treatment of DDD comprises one or more sgRNAs targeting exon 8 of fTGFBR1. In some embodiments, the CRISPR gene-editing system for the treatment of DDD comprises one or more sgRNAs targeting exon 9 of fTGFBR1. In some embodiments, the CRISPR gene-editing system for the treatment of DDD comprises one or more sgRNAs targeting exon 10 of fTGFBR1. In some embodiments, the CRISPR gene-editing system for the treatment of DDD comprises one or more sgRNAs targeting exon 11 of fTGFBR1.

[0415] In some embodiments, the CRISPR gene-editing system for the treatment of DDD comprises one or more sgRNAs targeting TGFBR2. In some embodiments, the CRISPR gene-editing system for the treatment of DDD comprises one or more sgRNAs targeting hTGFBR2. In some embodiments, the CRISPR gene-editing system for the treatment of DDD comprises one or more sgRNAs targeting cTGFBR2. In some embodiments, the CRISPR gene-editing system for the treatment of DDD comprises one or more sgRNAs targeting eTGFBR2. In some embodiments, the CRISPR gene-editing system for the treatment of DDD comprises one or more sgRNAs targeting fTGFBR2.

[0416] In some embodiments, the CRISPR gene-editing system for the treatment of DDD comprises one or more sgRNAs targeting exon 1 of hTGFBR2. In some embodiments, the CRISPR gene-editing system for the treatment of DDD comprises one or more sgRNAs targeting exon 2 of hTGFBR2. In some embodiments, the CRISPR gene-editing system for the treatment of DDD comprises one or more sgRNAs targeting exon 3 of hTGFBR2. In some embodiments, the CRISPR gene-editing system for the treatment of DDD comprises one or more sgRNAs targeting exon 4 of hTGFBR2. In some embodiments, the CRISPR gene-editing system for the treatment of DDD comprises one or more sgRNAs targeting exon 5 of hTGFBR2. In some embodiments, the CRISPR gene-editing system for the treatment of DDD comprises one or more sgRNAs targeting exon 6 of hTGFBR2. In some embodiments, the CRISPR gene-editing system for the treatment of DDD comprises one or more sgRNAs targeting exon 7 of hTGFBR2. In some embodiments, the CRISPR gene-editing system for the treatment of DDD comprises one or more sgRNAs targeting exon 8 of hTGFBR2. In some embodiments, the CRISPR gene-editing system for the treatment of DDD comprises one or more sgRNAs targeting exon 9 of hTGFBR2.

[0417] In some embodiments, the CRISPR gene-editing system for the treatment of DDD comprises one or more sgRNAs targeting exon 1 of cTGFBR2. In some embodiments, the CRISPR gene-editing system for the treatment of DDD comprises one or more sgRNAs targeting exon 2 of cTGFBR2. In some embodiments, the CRISPR gene-editing system for the treatment of DDD comprises one or more sgRNAs targeting exon 3 of cTGFBR2. In some embodiments, the CRISPR gene-editing system for the treatment of DDD comprises one or more sgRNAs targeting exon 4 of cTGFBR2. In some embodiments, the CRISPR gene-editing system for the treatment of DDD comprises one or more sgRNAs targeting exon 5 of cTGFBR2. In some embodiments, the CRISPR gene-editing system for the treatment of DDD comprises one or more sgRNAs targeting exon 6 of cTGFBR2. In some embodiments, the CRISPR gene-editing system for the treatment of DDD comprises one or more sgRNAs targeting exon 7 of cTGFBR2. In some embodiments, the CRISPR gene-editing system for the treatment of DDD comprises one or more sgRNAs targeting exon 8 of cTGFBR2.

[0418] In some embodiments, the CRISPR gene-editing system for the treatment of DDD comprises one or more sgRNAs targeting exon 1 of eTGFBR2. In some embodiments, the CRISPR gene-editing system for the treatment of DDD comprises one or more sgRNAs targeting exon 2 of eTGFBR2. In some embodiments, the CRISPR gene-editing system for the treatment of DDD comprises one or more sgRNAs targeting exon 3 of eTGFBR2. In some embodiments, the CRISPR gene-editing system for the treatment of DDD comprises one or more sgRNAs targeting exon 4 of eTGFBR2. In some embodiments, the CRISPR gene-editing system for the treatment of DDD comprises one or more sgRNAs targeting exon 5 of eTGFBR2. In some embodiments, the CRISPR gene-editing system for the treatment of DDD comprises one or more sgRNAs targeting exon 6 of eTGFBR2. In some embodiments, the CRISPR gene-editing system for the treatment of DDD comprises one or more sgRNAs targeting exon 7 of eTGFBR2. In some embodiments, the CRISPR gene-editing system for the treatment of DDD comprises one or more sgRNAs targeting exon 8 of eTGFBR2. In some embodiments, the CRISPR gene-editing system for the treatment of DDD comprises one or more sgRNAs targeting exon 9 of eTGFBR2. In some embodiments, the CRISPR gene-editing system for the treatment of DDD comprises one or more sgRNAs targeting exon 10 of eTGFBR2.

[0419] In some embodiments, the CRISPR gene-editing system for the treatment of DDD comprises one or more sgRNAs targeting exon 1 of fTGFBR2. In some embodiments, the CRISPR gene-editing system for the treatment of DDD comprises one or more sgRNAs targeting exon 2 of fTGFBR2. In some embodiments, the CRISPR gene-editing system for the treatment of DDD comprises one or more sgRNAs targeting exon 3 of fTGFBR2. In some embodiments, the CRISPR gene-editing system for the treatment of DDD comprises one or more sgRNAs targeting exon 4 of fTGFBR2. In some embodiments, the CRISPR gene-editing system for the treatment of DDD comprises one or more sgRNAs targeting exon 5 of fTGFBR2. In some embodiments, the CRISPR gene-editing system for the treatment of DDD comprises one or more sgRNAs targeting exon 6 of fTGFBR2. In some embodiments, the CRISPR gene-editing system for the treatment of DDD comprises one or more sgRNAs targeting exon 7 of fTGFBR2. In some embodiments, the CRISPR gene-editing system for the treatment of DDD comprises one or more sgRNAs targeting exon 8 of fTGFBR2.

[0420] In some embodiments, the CRISPR gene-editing system for the treatment of DDD comprises one or more sgRNAs targeting IL6R. In some embodiments, the CRISPR gene-editing system for the treatment of DDD comprises one or more sgRNAs targeting hIL6R. In some embodiments, the CRISPR gene-editing system for the treatment of DDD comprises one or more sgRNAs targeting cIL6R. In some embodiments, the CRISPR gene-editing system for the treatment of DDD comprises one or more sgRNAs targeting eIL6R. In some embodiments, the CRISPR gene-editing system for the treatment of DDD comprises one or more sgRNAs targeting fIL6R.

[0421] In some embodiments, the CRISPR gene-editing system for the treatment of DDD comprises one or more sgRNAs targeting exon 1 of hIL6R. In some embodiments, the CRISPR gene-editing system for the treatment of DDD comprises one or more sgRNAs targeting exon 2 of hIL6R. In some embodiments, the CRISPR gene-editing system for the treatment of DDD comprises one or more sgRNAs targeting exon 3 of hIL6R. In some embodiments, the CRISPR gene-editing system for the treatment of DDD comprises one or more sgRNAs targeting exon 4 of hIL6R. In some embodiments, the CRISPR gene-editing system for the treatment of DDD comprises one or more sgRNAs targeting exon 5 of hIL6R. In some embodiments, the CRISPR gene-editing system for the treatment of DDD comprises one or more sgRNAs targeting exon 6 of hIL6R. In some embodiments, the CRISPR gene-editing system for the treatment of DDD comprises one or more sgRNAs targeting exon 7 of hIL6R. In some embodiments, the CRISPR gene-editing system for the treatment of DDD comprises one or more sgRNAs targeting exon 8 of hIL6R. In some embodiments, the CRISPR gene-editing system for the treatment of DDD comprises one or more sgRNAs targeting exon 9 of hIL6R. In some embodiments, the CRISPR gene-editing system for the treatment of DDD comprises one or more sgRNAs targeting exon 10 of hIL6R. In some embodiments, the CRISPR gene-editing system for the treatment of DDD comprises one or more sgRNAs targeting exon 11 of hIL6R In some embodiments, the CRISPR gene-editing system for the treatment of DDD comprises one or more sgRNAs targeting exon 12 of hIL6R. In some embodiments, the CRISPR gene-editing system for the treatment of DDD comprises one or more sgRNAs targeting exon 13 of hIL6R. In some embodiments, the CRISPR gene-editing system for the treatment of DDD comprises one or more sgRNAs targeting exon 14 of hIL6R. In some embodiments, the CRISPR gene-editing system for the treatment of DDD comprises one or more sgRNAs targeting exon 15 of hIL6R.

[0422] In some embodiments, the CRISPR gene-editing system for the treatment of DDD comprises one or more sgRNAs targeting exon 1 of cIL6R. In some embodiments, the CRISPR gene-editing system for the treatment of DDD comprises one or more sgRNAs targeting exon 2 of cIL6R. In some embodiments, the CRISPR gene-editing system for the treatment of DDD comprises one or more sgRNAs targeting exon 3 of cIL6R. In some embodiments, the CRISPR gene-editing system for the treatment of DDD comprises one or more sgRNAs targeting exon 4 of cIL6R. In some embodiments, the CRISPR gene-editing system for the treatment of DDD comprises one or more sgRNAs targeting exon 5 of cIL6R. In some embodiments, the CRISPR gene-editing system for the treatment of DDD comprises one or more sgRNAs targeting exon 6 of cIL6R. In some embodiments, the CRISPR gene-editing system for the treatment of DDD comprises one or more sgRNAs targeting exon 7 of cIL6R. In some embodiments, the CRISPR gene-editing system for the treatment of DDD comprises one or more sgRNAs targeting exon 8 of cIL6R. In some embodiments, the CRISPR gene-editing system for the treatment of DDD comprises one or more sgRNAs targeting exon 9 of cIL6R. In some embodiments, the CRISPR gene-editing system for the treatment of DDD comprises one or more sgRNAs targeting exon 10 of cIL6R. In some embodiments, the CRISPR gene-editing system for the treatment of DDD comprises one or more sgRNAs targeting exon 11 of cIL6R. In some embodiments, the CRISPR gene-editing system for the treatment of DDD comprises one or more sgRNAs targeting exon 12 of cIL6R. In some embodiments, the CRISPR gene-editing system for the treatment of DDD comprises one or more sgRNAs targeting exon 13 of cIL6R.

[0423] In some embodiments, the CRISPR gene-editing system for the treatment of DDD comprises one or more sgRNAs targeting exon 1 of eIL6R. In some embodiments, the CRISPR gene-editing system for the treatment of DDD comprises one or more sgRNAs targeting exon 2 of eIL6R. In some embodiments, the CRISPR gene-editing system for the treatment of DDD comprises one or more sgRNAs targeting exon 3 of eIL6R. In some embodiments, the CRISPR gene-editing system for the treatment of DDD comprises one or more sgRNAs targeting exon 4 of eIL6R. In some embodiments, the CRISPR gene-editing system for the treatment of DDD comprises one or more sgRNAs targeting exon 5 of eIL6R. In some embodiments, the CRISPR gene-editing system for the treatment of DDD comprises one or more sgRNAs targeting exon 6 of eIL6R. In some embodiments, the CRISPR gene-editing system for the treatment of DDD comprises one or more sgRNAs targeting exon 7 of eIL6R. In some embodiments, the CRISPR gene-editing system for the treatment of DDD comprises one or more sgRNAs targeting exon 8 of eIL6R. In some embodiments, the CRISPR gene-editing system for the treatment of DDD comprises one or more sgRNAs targeting exon 9 of eIL6R. In some embodiments, the CRISPR gene-editing system for the treatment of DDD comprises one or more sgRNAs targeting exon 10 of eIL6R. In some embodiments, the CRISPR gene-editing system for the treatment of DDD comprises one or more sgRNAs targeting exon 11 of eIL6R.

[0424] In some embodiments, the CRISPR gene-editing system for the treatment of DDD comprises one or more sgRNAs targeting exon 1 of fIL6R. In some embodiments, the CRISPR gene-editing system for the treatment of DDD comprises one or more sgRNAs targeting exon 2 of fIL6R. In some embodiments, the CRISPR gene-editing system for the treatment of DDD comprises one or more sgRNAs targeting exon 3 of fIL6R. In some embodiments, the CRISPR gene-editing system for the treatment of DDD comprises one or more sgRNAs targeting exon 4 of fIL6R. In some embodiments, the CRISPR gene-editing system for the treatment of DDD comprises one or more sgRNAs targeting exon 5 of fIL6R. In some embodiments, the CRISPR gene-editing system for the treatment of DDD comprises one or more sgRNAs targeting exon 6 of fIL6R. In some embodiments, the CRISPR gene-editing system for the treatment of DDD comprises one or more sgRNAs targeting exon 7 of fIL6R. In some embodiments, the CRISPR gene-editing system for the treatment of DDD comprises one or more sgRNAs targeting exon 8 of fIL6R. In some embodiments, the CRISPR gene-editing system for the treatment of DDD comprises one or more sgRNAs targeting exon 9 of fIL6R. In some embodiments, the CRISPR gene-editing system for the treatment of DDD comprises one or more sgRNAs targeting exon 10 of fIL6R.

[0425] In some embodiments, the CRISPR gene-editing system for the treatment of DDD comprises one or more sgRNAs targeting IL6ST. In some embodiments, the CRISPR gene-editing system for the treatment of DDD comprises one or more sgRNAs targeting hIL6ST. In some embodiments, the CRISPR gene-editing system for the treatment of DDD comprises one or more sgRNAs targeting cIL6ST. In some embodiments, the CRISPR gene-editing system for the treatment of DDD comprises one or more sgRNAs targeting eIL6ST. In some embodiments, the CRISPR gene-editing system for the treatment of DDD comprises one or more sgRNAs targeting fIL6ST.

[0426] In some embodiments, the CRISPR gene-editing system for the treatment of DDD comprises one or more sgRNAs targeting exon 1 of hIL6ST. In some embodiments, the CRISPR gene-editing system for the treatment of DDD comprises one or more sgRNAs targeting exon 2 of hIL6ST. In some embodiments, the CRISPR gene-editing system for the treatment of DDD comprises one or more sgRNAs targeting exon 3 of hIL6ST. In some embodiments, the CRISPR gene-editing system for the treatment of DDD comprises one or more sgRNAs targeting exon 4 of hIL6ST. In some embodiments, the CRISPR gene-editing system for the treatment of DDD comprises one or more sgRNAs targeting exon 5 of hIL6ST. In some embodiments, the CRISPR gene-editing system for the treatment of DDD comprises one or more sgRNAs targeting exon 6 of hIL6ST. In some embodiments, the CRISPR gene-editing system for the treatment of DDD comprises one or more sgRNAs targeting exon 7 of hIL6ST. In some embodiments, the CRISPR gene-editing system for the treatment of DDD comprises one or more sgRNAs targeting exon 8 of hIL6ST. In some embodiments, the CRISPR gene-editing system for the treatment of DDD comprises one or more sgRNAs targeting exon 9 of hIL6ST. In some embodiments, the CRISPR gene-editing system for the treatment of DDD comprises one or more sgRNAs targeting exon 10 of hIL6ST. In some embodiments, the CRISPR gene-editing system for the treatment of DDD comprises one or more sgRNAs targeting exon 11 of hIL6ST. In some embodiments, the CRISPR gene-editing system for the treatment of DDD comprises one or more sgRNAs targeting exon 12 of hIL6ST. In some embodiments, the CRISPR gene-editing system for the treatment of DDD comprises one or more sgRNAs targeting exon 13 of hIL6ST. In some embodiments, the CRISPR gene-editing system for the treatment of DDD comprises one or more sgRNAs targeting exon 14 of hIL6ST. In some embodiments, the CRISPR gene-editing system for the treatment of DDD comprises one or more sgRNAs targeting exon 15 of hIL6ST. In some embodiments, the CRISPR gene-editing system for the treatment of DDD comprises one or more sgRNAs targeting exon 16 of hIL6ST. In some embodiments, the CRISPR gene-editing system for the treatment of DDD comprises one or more sgRNAs targeting exon 17 of hIL6ST. In some embodiments, the CRISPR gene-editing system for the treatment of DDD comprises one or more sgRNAs targeting exon 18 of hIL6ST. In some embodiments, the CRISPR gene-editing system for the treatment of DDD comprises one or more sgRNAs targeting exon 19 of hIL6ST.

[0427] In some embodiments, the CRISPR gene-editing system for the treatment of DDD comprises one or more sgRNAs targeting exon 1 of cIL6ST. In some embodiments, the CRISPR gene-editing system for the treatment of DDD comprises one or more sgRNAs targeting exon 2 of cIL6ST. In some embodiments, the CRISPR gene-editing system for the treatment of DDD comprises one or more sgRNAs targeting exon 3 of cIL6ST. In some embodiments, the CRISPR gene-editing system for the treatment of DDD comprises one or more sgRNAs targeting exon 4 of cIL6ST. In some embodiments, the CRISPR gene-editing system for the treatment of DDD comprises one or more sgRNAs targeting exon 5 of cIL6ST. In some embodiments, the CRISPR gene-editing system for the treatment of DDD comprises one or more sgRNAs targeting exon 6 of cIL6ST. In some embodiments, the CRISPR gene-editing system for the treatment of DDD comprises one or more sgRNAs targeting exon 7 of cIL6ST. In some embodiments, the CRISPR gene-editing system for the treatment of DDD comprises one or more sgRNAs targeting exon 8 of cIL6ST. In some embodiments, the CRISPR gene-editing system for the treatment of DDD comprises one or more sgRNAs targeting exon 9 of cIL6ST. In some embodiments, the CRISPR gene-editing system for the treatment of DDD comprises one or more sgRNAs targeting exon 10 of cIL6ST. In some embodiments, the CRISPR gene-editing system for the treatment of DDD comprises one or more sgRNAs targeting exon 11 of cIL6ST In some embodiments, the CRISPR gene-editing system for the treatment of DDD comprises one or more sgRNAs targeting exon 12 of cIL6ST. In some embodiments, the CRISPR gene-editing system for the treatment of DDD comprises one or more sgRNAs targeting exon 13 of cIL6ST. In some embodiments, the CRISPR gene-editing system for the treatment of DDD comprises one or more sgRNAs targeting exon 14 of cIL6ST. In some embodiments, the CRISPR gene-editing system for the treatment of DDD comprises one or more sgRNAs targeting exon 15 of cIL6ST. In some embodiments, the CRISPR gene-editing system for the treatment of DDD comprises one or more sgRNAs targeting exon 16 of cIL6ST. In some embodiments, the CRISPR gene-editing system for the treatment of DDD comprises one or more sgRNAs targeting exon 17 of cIL6ST. In some embodiments, the CRISPR gene-editing system for the treatment of DDD comprises one or more sgRNAs targeting exon 18 of cIL6ST.

[0428] In some embodiments, the CRISPR gene-editing system for the treatment of DDD comprises one or more sgRNAs targeting exon 1 of eIL6ST. In some embodiments, the CRISPR gene-editing system for the treatment of DDD comprises one or more sgRNAs targeting exon 2 of eIL6ST. In some embodiments, the CRISPR gene-editing system for the treatment of DDD comprises one or more sgRNAs targeting exon 3 of eIL6ST. In some embodiments, the CRISPR gene-editing system for the treatment of DDD comprises one or more sgRNAs targeting exon 4 of eIL6ST. In some embodiments, the CRISPR gene-editing system for the treatment of DDD comprises one or more sgRNAs targeting exon 5 of eIL6ST. In some embodiments, the CRISPR gene-editing system for the treatment of DDD comprises one or more sgRNAs targeting exon 6 of eIL6ST. In some embodiments, the CRISPR gene-editing system for the treatment of DDD comprises one or more sgRNAs targeting exon 7 of eIL6ST. In some embodiments, the CRISPR gene-editing system for the treatment of DDD comprises one or more sgRNAs targeting exon 8 of eIL6ST. In some embodiments, the CRISPR gene-editing system for the treatment of DDD comprises one or more sgRNAs targeting exon 9 of eIL6ST. In some embodiments, the CRISPR gene-editing system for the treatment of DDD comprises one or more sgRNAs targeting exon 10 of eIL6ST. In some embodiments, the CRISPR gene-editing system for the treatment of DDD comprises one or more sgRNAs targeting exon 11 of eIL6ST In some embodiments, the CRISPR gene-editing system for the treatment of DDD comprises one or more sgRNAs targeting exon 12 of eIL6ST. In some embodiments, the CRISPR gene-editing system for the treatment of DDD comprises one or more sgRNAs targeting exon 13 of eIL6ST. In some embodiments, the CRISPR gene-editing system for the treatment of DDD comprises one or more sgRNAs targeting exon 14 of eIL6ST. In some embodiments, the CRISPR gene-editing system for the treatment of DDD comprises one or more sgRNAs targeting exon 15 of eIL6ST. In some embodiments, the CRISPR gene-editing system for the treatment of DDD comprises one or more sgRNAs targeting exon 16 of eIL6ST. In some embodiments, the CRISPR gene-editing system for the treatment of DDD comprises one or more sgRNAs targeting exon 17 of eIL6ST. In some embodiments, the CRISPR gene-editing system for the treatment of DDD comprises one or more sgRNAs targeting exon 18 of eIL6ST.

[0429] In some embodiments, the CRISPR gene-editing system for the treatment of DDD comprises one or more sgRNAs targeting exon 1 of fIL6ST. In some embodiments, the CRISPR gene-editing system for the treatment of DDD comprises one or more sgRNAs targeting exon 2 of fIL6ST. In some embodiments, the CRISPR gene-editing system for the treatment of DDD comprises one or more sgRNAs targeting exon 3 of fIL6ST. In some embodiments, the CRISPR gene-editing system for the treatment of DDD comprises one or more sgRNAs targeting exon 4 of fIL6ST. In some embodiments, the CRISPR gene-editing system for the treatment of DDD comprises one or more sgRNAs targeting exon 5 of fIL6ST. In some embodiments, the CRISPR gene-editing system for the treatment of DDD comprises one or more sgRNAs targeting exon 6 of fIL6ST. In some embodiments, the CRISPR gene-editing system for the treatment of DDD comprises one or more sgRNAs targeting exon 7 of fIL6ST. In some embodiments, the CRISPR gene-editing system for the treatment of DDD comprises one or more sgRNAs targeting exon 8 of fIL6ST. In some embodiments, the CRISPR gene-editing system for the treatment of DDD comprises one or more sgRNAs targeting exon 9 of fIL6ST. In some embodiments, the CRISPR gene-editing system for the treatment of DDD comprises one or more sgRNAs targeting exon 10 of fIL6ST. In some embodiments, the CRISPR gene-editing system for the treatment of DDD comprises one or more sgRNAs targeting exon 11 of fIL6ST In some embodiments, the CRISPR gene-editing system for the treatment of DDD comprises one or more sgRNAs targeting exon 12 of fIL6ST. In some embodiments, the CRISPR gene-editing system for the treatment of DDD comprises one or more sgRNAs targeting exon 13 of fIL6ST. In some embodiments, the CRISPR gene-editing system for the treatment of DDD comprises one or more sgRNAs targeting exon 14 of fIL6ST. In some embodiments, the CRISPR gene-editing system for the treatment of DDD comprises one or more sgRNAs targeting exon 15 of fIL6ST. In some embodiments, the CRISPR gene-editing system for the treatment of DDD comprises one or more sgRNAs targeting exon 16 of fIL6ST. In some embodiments, the CRISPR gene-editing system for the treatment of DDD comprises one or more sgRNAs targeting exon 17 of fIL6ST. In some embodiments, the CRISPR gene-editing system for the treatment of DDD comprises one or more sgRNAs targeting exon 18 of fIL6ST. In some embodiments, the CRISPR gene-editing system for the treatment of DDD comprises one or more sgRNAs targeting exon 19 of fIL6ST. In some embodiments, the CRISPR gene-editing system for the treatment of DDD comprises one or more sgRNAs targeting exon 20 of fIL6ST.

[0430] In some embodiments, the CRISPR gene-editing system for the treatment of DDD comprises one or more sgRNAs targeting TNFRSF1A. In some embodiments, the CRISPR gene-editing system for the treatment of DDD comprises one or more sgRNAs targeting hTNFRSF1A. In some embodiments, the CRISPR gene-editing system for the treatment of DDD comprises one or more sgRNAs targeting cTNFRSF1A. In some embodiments, the CRISPR gene-editing system for the treatment of DDD comprises one or more sgRNAs targeting eTNFRSF1A. In some embodiments, the CRISPR gene-editing system for the treatment of DDD comprises one or more sgRNAs targeting fTNFRSF1A.

[0431] In some embodiments, the CRISPR gene-editing system for the treatment of DDD comprises one or more sgRNAs targeting exon 1 of hTNFRSF1A. In some embodiments, the CRISPR gene-editing system for the treatment of DDD comprises one or more sgRNAs targeting exon 2 of hTNFRSF1A. In some embodiments, the CRISPR gene-editing system for the treatment of DDD comprises one or more sgRNAs targeting exon 3 of hTNFRSF1A. In some embodiments, the CRISPR gene-editing system for the treatment of DDD comprises one or more sgRNAs targeting exon 4 of hTNFRSF1A. In some embodiments, the CRISPR gene-editing system for the treatment of DDD comprises one or more sgRNAs targeting exon 5 of hTNFRSF1A. In some embodiments, the CRISPR gene-editing system for the treatment of DDD comprises one or more sgRNAs targeting exon 6 of hTNFRSF1A. In some embodiments, the CRISPR gene-editing system for the treatment of DDD comprises one or more sgRNAs targeting exon 7 of hTNFRSF1A. In some embodiments, the CRISPR gene-editing system for the treatment of DDD comprises one or more sgRNAs targeting exon 8 of hTNFRSF1A. In some embodiments, the CRISPR gene-editing system for the treatment of DDD comprises one or more sgRNAs targeting exon 9 of hTNFRSF1A. In some embodiments, the CRISPR gene-editing system for the treatment of DDD comprises one or more sgRNAs targeting exon 10 of hTNFRSF1A. In some embodiments, the CRISPR gene-editing system for the treatment of DDD comprises one or more sgRNAs targeting exon 11 of hTNFRSF1A.

[0432] In some embodiments, the CRISPR gene-editing system for the treatment of DDD comprises one or more sgRNAs targeting exon 1 of cTNFRSF1A. In some embodiments, the CRISPR gene-editing system for the treatment of DDD comprises one or more sgRNAs targeting exon 2 of cTNFRSF1A. In some embodiments, the CRISPR gene-editing system for the treatment of DDD comprises one or more sgRNAs targeting exon 3 of cTNFRSF1A. In some embodiments, the CRISPR gene-editing system for the treatment of DDD comprises one or more sgRNAs targeting exon 4 of cTNFRSF1A. In some embodiments, the CRISPR gene-editing system for the treatment of DDD comprises one or more sgRNAs targeting exon 5 of cTNFRSF1A. In some embodiments, the CRISPR gene-editing system for the treatment of DDD comprises one or more sgRNAs targeting exon 6 of cTNFRSF1A. In some embodiments, the CRISPR gene-editing system for the treatment of DDD comprises one or more sgRNAs targeting exon 7 of cTNFRSF1A. In some embodiments, the CRISPR gene-editing system for the treatment of DDD comprises one or more sgRNAs targeting exon 8 of cTNFRSF1A. In some embodiments, the CRISPR gene-editing system for the treatment of DDD comprises one or more sgRNAs targeting exon 9 of cTNFRSF1A. In some embodiments, the CRISPR gene-editing system for the treatment of DDD comprises one or more sgRNAs targeting exon 10 of cTNFRSF1A. In some embodiments, the CRISPR gene-editing system for the treatment of DDD comprises one or more sgRNAs targeting exon 11 of cTNFRSF1A.

[0433] In some embodiments, the CRISPR gene-editing system for the treatment of DDD comprises one or more sgRNAs targeting exon 1 of eTNFRSF1A. In some embodiments, the CRISPR gene-editing system for the treatment of DDD comprises one or more sgRNAs targeting exon 2 of eTNFRSF1A. In some embodiments, the CRISPR gene-editing system for the treatment of DDD comprises one or more sgRNAs targeting exon 3 of eTNFRSF1A. In some embodiments, the CRISPR gene-editing system for the treatment of DDD comprises one or more sgRNAs targeting exon 4 of eTNFRSF1A. In some embodiments, the CRISPR gene-editing system for the treatment of DDD comprises one or more sgRNAs targeting exon 5 of eTNFRSF1A. In some embodiments, the CRISPR gene-editing system for the treatment of DDD comprises one or more sgRNAs targeting exon 6 of eTNFRSF1A. In some embodiments, the CRISPR gene-editing system for the treatment of DDD comprises one or more sgRNAs targeting exon 7 of eTNFRSF1A. In some embodiments, the CRISPR gene-editing system for the treatment of DDD comprises one or more sgRNAs targeting exon 8 of eTNFRSF1A. In some embodiments, the CRISPR gene-editing system for the treatment of DDD comprises one or more sgRNAs targeting exon 9 of eTNFRSF1A. In some embodiments, the CRISPR gene-editing system for the treatment of DDD comprises one or more sgRNAs targeting exon 10 of eTNFRSF1A.

[0434] In some embodiments, the CRISPR gene-editing system for the treatment of DDD comprises one or more sgRNAs targeting exon 1 of fTNFRSF1A. In some embodiments, the CRISPR gene-editing system for the treatment of DDD comprises one or more sgRNAs targeting exon 2 of fTNFRSF1A. In some embodiments, the CRISPR gene-editing system for the treatment of DDD comprises one or more sgRNAs targeting exon 3 of fTNFRSF1A. In some embodiments, the CRISPR gene-editing system for the treatment of DDD comprises one or more sgRNAs targeting exon 4 of fTNFRSF1A. In some embodiments, the CRISPR gene-editing system for the treatment of DDD comprises one or more sgRNAs targeting exon 5 of fTNFRSF1A. In some embodiments, the CRISPR gene-editing system for the treatment of DDD comprises one or more sgRNAs targeting exon 6 of fTNFRSF1A. In some embodiments, the CRISPR gene-editing system for the treatment of DDD comprises one or more sgRNAs targeting exon 7 of fTNFRSF1A. In some embodiments, the CRISPR gene-editing system for the treatment of DDD comprises one or more sgRNAs targeting exon 8 of fTNFRSF1A. In some embodiments, the CRISPR gene-editing system for the treatment of DDD comprises one or more sgRNAs targeting exon 9 of fTNFRSF1A. In some embodiments, the CRISPR gene-editing system for the treatment of DDD comprises one or more sgRNAs targeting exon 10 of fTNFRSF1A.

[0435] In some embodiments, the CRISPR gene-editing system for the treatment of DDD comprises one or more sgRNAs targeting TNFRSF1B. In some embodiments, the CRISPR gene-editing system for the treatment of DDD comprises one or more sgRNAs targeting hTNFRSF1B. In some embodiments, the CRISPR gene-editing system for the treatment of DDD comprises one or more sgRNAs targeting cTNFRSF1B. In some embodiments, the CRISPR gene-editing system for the treatment of DDD comprises one or more sgRNAs targeting eTNFRSF1B. In some embodiments, the CRISPR gene-editing system for the treatment of DDD comprises one or more sgRNAs targeting fTNFRSF1B.

[0436] In some embodiments, the CRISPR gene-editing system for the treatment of DDD comprises one or more sgRNAs targeting exon 1 of hTNFRSF1B. In some embodiments, the CRISPR gene-editing system for the treatment of DDD comprises one or more sgRNAs targeting exon 2 of hTNFRSF1B. In some embodiments, the CRISPR gene-editing system for the treatment of DDD comprises one or more sgRNAs targeting exon 3 of hTNFRSF1B. In some embodiments, the CRISPR gene-editing system for the treatment of DDD comprises one or more sgRNAs targeting exon 4 of hTNFRSF1B. In some embodiments, the CRISPR gene-editing system for the treatment of DDD comprises one or more sgRNAs targeting exon 5 of hTNFRSF1B. In some embodiments, the CRISPR gene-editing system for the treatment of DDD comprises one or more sgRNAs targeting exon 6 of hTNFRSF1B. In some embodiments, the CRISPR gene-editing system for the treatment of DDD comprises one or more sgRNAs targeting exon 7 of hTNFRSF1B. In some embodiments, the CRISPR gene-editing system for the treatment of DDD comprises one or more sgRNAs targeting exon 8 of hTNFRSF1B. In some embodiments, the CRISPR gene-editing system for the treatment of DDD comprises one or more sgRNAs targeting exon 9 of hTNFRSF1B. In some embodiments, the CRISPR gene-editing system for the treatment of DDD comprises one or more sgRNAs targeting exon 10 of hTNFRSF1B. In some embodiments, the CRISPR gene-editing system for the treatment of DDD comprises one or more sgRNAs targeting exon 11 of hTNFRSF1B In some embodiments, the CRISPR gene-editing system for the treatment of DDD comprises one or more sgRNAs targeting exon 12 of hTNFRSF1B. In some embodiments, the CRISPR gene-editing system for the treatment of DDD comprises one or more sgRNAs targeting exon 13 of hTNFRSF1B.

[0437] In some embodiments, the CRISPR gene-editing system for the treatment of DDD comprises one or more sgRNAs targeting exon 1 of cTNFRSF1B. In some embodiments, the CRISPR gene-editing system for the treatment of DDD comprises one or more sgRNAs targeting exon 2 of cTNFRSF1B. In some embodiments, the CRISPR gene-editing system for the treatment of DDD comprises one or more sgRNAs targeting exon 3 of cTNFRSF1B. In some embodiments, the CRISPR gene-editing system for the treatment of DDD comprises one or more sgRNAs targeting exon 4 of cTNFRSF1B. In some embodiments, the CRISPR gene-editing system for the treatment of DDD comprises one or more sgRNAs targeting exon 5 of cTNFRSF1B. In some embodiments, the CRISPR gene-editing system for the treatment of DDD comprises one or more sgRNAs targeting exon 6 of cTNFRSF1B. In some embodiments, the CRISPR gene-editing system for the treatment of DDD comprises one or more sgRNAs targeting exon 7 of cTNFRSF1B. In some embodiments, the CRISPR gene-editing system for the treatment of DDD comprises one or more sgRNAs targeting exon 8 of CTNFRSF1B. In some embodiments, the CRISPR gene-editing system for the treatment of DDD comprises one or more sgRNAs targeting exon 9 of cTNFRSF1B. In some embodiments, the CRISPR gene-editing system for the treatment of DDD comprises one or more sgRNAs targeting exon 10 of cTNFRSF1B. In some embodiments, the CRISPR gene-editing system for the treatment of DDD comprises one or more sgRNAs targeting exon 11 of cTNFRSF1B.

[0438] In some embodiments, the CRISPR gene-editing system for the treatment of DDD comprises one or more sgRNAs targeting exon 1 of eTNFRSF1B. In some embodiments, the CRISPR gene-editing system for the treatment of DDD comprises one or more sgRNAs targeting exon 2 of eTNFRSF1B. In some embodiments, the CRISPR gene-editing system for the treatment of DDD comprises one or more sgRNAs targeting exon 3 of eTNFRSF1B. In some embodiments, the CRISPR gene-editing system for the treatment of DDD comprises one or more sgRNAs targeting exon 4 of eTNFRSF1B. In some embodiments, the CRISPR gene-editing system for the treatment of DDD comprises one or more sgRNAs targeting exon 5 of eTNFRSF1B. In some embodiments, the CRISPR gene-editing system for the treatment of DDD comprises one or more sgRNAs targeting exon 6 of eTNFRSF1B. In some embodiments, the CRISPR gene-editing system for the treatment of DDD comprises one or more sgRNAs targeting exon 7 of eTNFRSF1B. In some embodiments, the CRISPR gene-editing system for the treatment of DDD comprises one or more sgRNAs targeting exon 8 of eTNFRSF1B. In some embodiments, the CRISPR gene-editing system for the treatment of.

[0439] DDD comprises one or more sgRNAs targeting exon 9 of eTNFRSF1B. In some embodiments, the CRISPR gene-editing system for the treatment of DDD comprises one or more sgRNAs targeting exon 10 of eTNFRSF1B. In some embodiments, the CRISPR gene-editing system for the treatment of DDD comprises one or more sgRNAs targeting exon 11 of eTNFRSF1B.

[0440] In some embodiments, the CRISPR gene-editing system for the treatment of DDD comprises one or more sgRNAs targeting exon 1 of fTNFRSF1B. In some embodiments, the CRISPR gene-editing system for the treatment of DDD comprises one or more sgRNAs targeting exon 2 of fTNFRSF1B. In some embodiments, the CRISPR gene-editing system for the treatment of DDD comprises one or more sgRNAs targeting exon 3 of fTNFRSF1B. In some embodiments, the CRISPR gene-editing system for the treatment of DDD comprises one or more sgRNAs targeting exon 4 of fTNFRSF1B. In some embodiments, the CRISPR gene-editing system for the treatment of DDD comprises one or more sgRNAs targeting exon 5 of fTNFRSF1B. In some embodiments, the CRISPR gene-editing system for the treatment of DDD comprises one or more sgRNAs targeting exon 6 of fTNFRSF1B. In some embodiments, the CRISPR gene-editing system for the treatment of DDD comprises one or more sgRNAs targeting exon 7 of fTNFRSF1B. In some embodiments, the CRISPR gene-editing system for the treatment of DDD comprises one or more sgRNAs targeting exon 8 of fTNFRSF1B. In some embodiments, the CRISPR gene-editing system for the treatment of DDD comprises one or more sgRNAs targeting exon 9 of fTNFRSF1B. In some embodiments, the CRISPR gene-editing system for the treatment of DDD comprises one or more sgRNAs targeting exon 10 of fTNFRSF1B.

[0441] In some embodiments, the CRISPR gene-editing system for the treatment of DDD comprises one or more sgRNAs targeting TNFRSF3. In some embodiments, the CRISPR gene-editing system for the treatment of DDD comprises one or more sgRNAs targeting hTNFRSF3. In some embodiments, the CRISPR gene-editing system for the treatment of DDD comprises one or more sgRNAs targeting cTNFRSF3. In some embodiments, the CRISPR gene-editing system for the treatment of DDD comprises one or more sgRNAs targeting eTNFRSF3. In some embodiments, the CRISPR gene-editing system for the treatment of DDD comprises one or more sgRNAs targeting fTNFRSF3.

[0442] In some embodiments, the CRISPR gene-editing system for the treatment of DDD comprises one or more sgRNAs targeting exon 1 of hTNFRSF3. In some embodiments, the CRISPR gene-editing system for the treatment of DDD comprises one or more sgRNAs targeting exon 2 of hTNFRSF3. In some embodiments, the CRISPR gene-editing system for the treatment of DDD comprises one or more sgRNAs targeting exon 3 of hTNFRSF3. In some embodiments, the CRISPR gene-editing system for the treatment of DDD comprises one or more sgRNAs targeting exon 4 of hTNFRSF3. In some embodiments, the CRISPR gene-editing system for the treatment of DDD comprises one or more sgRNAs targeting exon 5 of hTNFRSF3. In some embodiments, the CRISPR gene-editing system for the treatment of DDD comprises one or more sgRNAs targeting exon 6 of hTNFRSF3. In some embodiments, the CRISPR gene-editing system for the treatment of DDD comprises one or more sgRNAs targeting exon 7 of hTNFRSF3. In some embodiments, the CRISPR gene-editing system for the treatment of DDD comprises one or more sgRNAs targeting exon 8 of hTNFRSF3. In some embodiments, the CRISPR gene-editing system for the treatment of DDD comprises one or more sgRNAs targeting exon 9 of hTNFRSF3. In some embodiments, the CRISPR gene-editing system for the treatment of DDD comprises one or more sgRNAs targeting exon 10 of hTNFRSF3. In some embodiments, the CRISPR gene-editing system for the treatment of DDD comprises one or more sgRNAs targeting exon 11 of hTNFRSF3. In some embodiments, the CRISPR gene-editing system for the treatment of DDD comprises one or more sgRNAs targeting exon 12 of hTNFRSF3.

[0443] In some embodiments, the CRISPR gene-editing system for the treatment of DDD comprises one or more sgRNAs targeting exon 1 of cTNFRSF3. In some embodiments, the CRISPR gene-editing system for the treatment of DDD comprises one or more sgRNAs targeting exon 2 of cTNFRSF3. In some embodiments, the CRISPR gene-editing system for the treatment of DDD comprises one or more sgRNAs targeting exon 3 of cTNFRSF3. In some embodiments, the CRISPR gene-editing system for the treatment of DDD comprises one or more sgRNAs targeting exon 4 of cTNFRSF3. In some embodiments, the CRISPR gene-editing system for the treatment of DDD comprises one or more sgRNAs targeting exon 5 of cTNFRSF3. In some embodiments, the CRISPR gene-editing system for the treatment of DDD comprises one or more sgRNAs targeting exon 6 of cTNFRSF3. In some embodiments, the CRISPR gene-editing system for the treatment of DDD comprises one or more sgRNAs targeting exon 7 of cTNFRSF3. In some embodiments, the CRISPR gene-editing system for the treatment of DDD comprises one or more sgRNAs targeting exon 8 of cTNFRSF3. In some embodiments, the CRISPR gene-editing system for the treatment of DDD comprises one or more sgRNAs targeting exon 9 of cTNFRSF3. In some embodiments, the CRISPR gene-editing system for the treatment of DDD comprises one or more sgRNAs targeting exon 10 of cTNFRSF3.

[0444] In some embodiments, the CRISPR gene-editing system for the treatment of DDD comprises one or more sgRNAs targeting exon 1 of eTNFRSF3. In some embodiments, the CRISPR gene-editing system for the treatment of DDD comprises one or more sgRNAs targeting exon 2 of eTNFRSF3. In some embodiments, the CRISPR gene-editing system for the treatment of DDD comprises one or more sgRNAs targeting exon 3 of eTNFRSF3. In some embodiments, the CRISPR gene-editing system for the treatment of DDD comprises one or more sgRNAs targeting exon 4 of eTNFRSF3. In some embodiments, the CRISPR gene-editing system for the treatment of DDD comprises one or more sgRNAs targeting exon 5 of eTNFRSF3. In some embodiments, the CRISPR gene-editing system for the treatment of DDD comprises one or more sgRNAs targeting exon 6 of eTNFRSF3. In some embodiments, the CRISPR gene-editing system for the treatment of DDD comprises one or more sgRNAs targeting exon 7 of eTNFRSF3. In some embodiments, the CRISPR gene-editing system for the treatment of DDD comprises one or more sgRNAs targeting exon 8 of eTNFRSF3. In some embodiments, the CRISPR gene-editing system for the treatment of DDD comprises one or more sgRNAs targeting exon 9 of eTNFRSF3. In some embodiments, the CRISPR gene-editing system for the treatment of DDD comprises one or more sgRNAs targeting exon 10 of eTNFRSF3.

[0445] In some embodiments, the CRISPR gene-editing system for the treatment of DDD comprises one or more sgRNAs targeting exon 1 of fTNFRSF3. In some embodiments, the CRISPR gene-editing system for the treatment of DDD comprises one or more sgRNAs targeting exon 2 of fTNFRSF3. In some embodiments, the CRISPR gene-editing system for the treatment of DDD comprises one or more sgRNAs targeting exon 3 of fTNFRSF3. In some embodiments, the CRISPR gene-editing system for the treatment of DDD comprises one or more sgRNAs targeting exon 4 of fTNFRSF3. In some embodiments, the CRISPR gene-editing system for the treatment of DDD comprises one or more sgRNAs targeting exon 5 of fTNFRSF3. In some embodiments, the CRISPR gene-editing system for the treatment of DDD comprises one or more sgRNAs targeting exon 6 of fTNFRSF3. In some embodiments, the CRISPR gene-editing system for the treatment of DDD comprises one or more sgRNAs targeting exon 7 of fTNFRSF3. In some embodiments, the CRISPR gene-editing system for the treatment of DDD comprises one or more sgRNAs targeting exon 8 of fTNFRSF3. In some embodiments, the CRISPR gene-editing system for the treatment of DDD comprises one or more sgRNAs targeting exon 9 of fTNFRSF3. In some embodiments, the CRISPR gene-editing system for the treatment of DDD comprises one or more sgRNAs targeting exon 10 of fTNFRSF3.

[0446] In some embodiments, the CRISPR gene-editing system for the treatment of DDD comprises one or more sgRNAs targeting TNFRSF4. In some embodiments, the CRISPR gene-editing system for the treatment of DDD comprises one or more sgRNAs targeting hTNFRSF4. In some embodiments, the CRISPR gene-editing system for the treatment of DDD comprises one or more sgRNAs targeting cTNFRSF4. In some embodiments, the CRISPR gene-editing system for the treatment of DDD comprises one or more sgRNAs targeting eTNFRSF4. In some embodiments, the CRISPR gene-editing system for the treatment of DDD comprises one or more sgRNAs targeting fTNFRSF4.

[0447] In some embodiments, the CRISPR gene-editing system for the treatment of DDD comprises one or more sgRNAs targeting exon 1 of hTNFRSF4. In some embodiments, the CRISPR gene-editing system for the treatment of DDD comprises one or more sgRNAs targeting exon 2 of hTNFRSF4. In some embodiments, the CRISPR gene-editing system for the treatment of DDD comprises one or more sgRNAs targeting exon 3 of hTNFRSF4. In some embodiments, the CRISPR gene-editing system for the treatment of DDD comprises one or more sgRNAs targeting exon 4 of hTNFRSF4. In some embodiments, the CRISPR gene-editing system for the treatment of DDD comprises one or more sgRNAs targeting exon 5 of hTNFRSF4. In some embodiments, the CRISPR gene-editing system for the treatment of DDD comprises one or more sgRNAs targeting exon 6 of hTNFRSF4.

[0448] In some embodiments, the CRISPR gene-editing system for the treatment of DDD comprises one or more sgRNAs targeting exon 1 of cTNFRSF4. In some embodiments, the CRISPR gene-editing system for the treatment of DDD comprises one or more sgRNAs targeting exon 2 of cTNFRSF4. In some embodiments, the CRISPR gene-editing system for the treatment of DDD comprises one or more sgRNAs targeting exon 3 of cTNFRSF4. In some embodiments, the CRISPR gene-editing system for the treatment of DDD comprises one or more sgRNAs targeting exon 4 of cTNFRSF4. In some embodiments, the CRISPR gene-editing system for the treatment of DDD comprises one or more sgRNAs targeting exon 5 of cTNFRSF4. In some embodiments, the CRISPR gene-editing system for the treatment of DDD comprises one or more sgRNAs targeting exon 6 of cTNFRSF4. In some embodiments, the CRISPR gene-editing system for the treatment of DDD comprises one or more sgRNAs targeting exon 7 of cTNFRSF4.

[0449] In some embodiments, the CRISPR gene-editing system for the treatment of DDD comprises one or more sgRNAs targeting exon 1 of eTNFRSF4. In some embodiments, the CRISPR gene-editing system for the treatment of DDD comprises one or more sgRNAs targeting exon 2 of eTNFRSF4. In some embodiments, the CRISPR gene-editing system for the treatment of DDD comprises one or more sgRNAs targeting exon 3 of eTNFRSF4. In some embodiments, the CRISPR gene-editing system for the treatment of DDD comprises one or more sgRNAs targeting exon 4 of eTNFRSF4. In some embodiments, the CRISPR gene-editing system for the treatment of DDD comprises one or more sgRNAs targeting exon 5 of eTNFRSF4. In some embodiments, the CRISPR gene-editing system for the treatment of DDD comprises one or more sgRNAs targeting exon 6 of eTNFRSF4. In some embodiments, the CRISPR gene-editing system for the treatment of DDD comprises one or more sgRNAs targeting exon 7 of eTNFRSF4.

[0450] In some embodiments, the CRISPR gene-editing system for the treatment of DDD comprises one or more sgRNAs targeting exon 1 of fTNFRSF4. In some embodiments, the CRISPR gene-editing system for the treatment of DDD comprises one or more sgRNAs targeting exon 2 of fTNFRSF4. In some embodiments, the CRISPR gene-editing system for the treatment of DDD comprises one or more sgRNAs targeting exon 3 of fTNFRSF4. In some embodiments, the CRISPR gene-editing system for the treatment of DDD comprises one or more sgRNAs targeting exon 4 of fTNFRSF4. In some embodiments, the CRISPR gene-editing system for the treatment of DDD comprises one or more sgRNAs targeting exon 5 of fTNFRSF4. In some embodiments, the CRISPR gene-editing system for the treatment of DDD comprises one or more sgRNAs targeting exon 6 of fTNFRSF4. In some embodiments, the CRISPR gene-editing system for the treatment of DDD comprises one or more sgRNAs targeting exon 7 of fTNFRSF4.

[0451] In some embodiments, the CRISPR gene-editing system for the treatment of DDD comprises one or more sgRNAs targeting TNFRSF11A. In some embodiments, the CRISPR gene-editing system for the treatment of DDD comprises one or more sgRNAs targeting hTNFRSF11A. In some embodiments, the CRISPR gene-editing system for the treatment of DDD comprises one or more sgRNAs targeting cTNFRSF11A. In some embodiments, the CRISPR gene-editing system for the treatment of DDD comprises one or more sgRNAs targeting eTNFRSF11A. In some embodiments, the CRISPR gene-editing system for the treatment of DDD comprises one or more sgRNAs targeting fTNFRSF11A.

[0452] In some embodiments, the CRISPR gene-editing system for the treatment of DDD comprises one or more sgRNAs targeting exon 1 of hTNFRSF11A. In some embodiments, the CRISPR gene-editing system for the treatment of DDD comprises one or more sgRNAs targeting exon 2 of hTNFRSF11A. In some embodiments, the CRISPR gene-editing system for the treatment of DDD comprises one or more sgRNAs targeting exon 3 of hTNFRSF11A. In some embodiments, the CRISPR gene-editing system for the treatment of DDD comprises one or more sgRNAs targeting exon 4 of hTNFRSF11A. In some embodiments, the CRISPR gene-editing system for the treatment of DDD comprises one or more sgRNAs targeting exon 5 of hTNFRSF11A. In some embodiments, the CRISPR gene-editing system for the treatment of DDD comprises one or more sgRNAs targeting exon 6 of hTNFRSF11A. In some embodiments, the CRISPR gene-editing system for the treatment of DDD comprises one or more sgRNAs targeting exon 7 of hTNFRSF11A. In some embodiments, the CRISPR gene-editing system for the treatment of DDD comprises one or more sgRNAs targeting exon 8 of hTNFRSF11A. In some embodiments, the CRISPR gene-editing system for the treatment of DDD comprises one or more sgRNAs targeting exon 9 of hTNFRSF11A. In some embodiments, the CRISPR gene-editing system for the treatment of DDD comprises one or more sgRNAs targeting exon 10 of hTNFRSF11A. In some embodiments, the CRISPR gene-editing system for the treatment of DDD comprises one or more sgRNAs targeting exon 11 of hTNFRSF11A. In some embodiments, the CRISPR gene-editing system for the treatment of DDD comprises one or more sgRNAs targeting exon 12 of hTNFRSF11A.

[0453] In some embodiments, the CRISPR gene-editing system for the treatment of DDD comprises one or more sgRNAs targeting exon 1 of cTNFRSF11A. In some embodiments, the CRISPR gene-editing system for the treatment of DDD comprises one or more sgRNAs targeting exon 2 of cTNFRSF11A. In some embodiments, the CRISPR gene-editing system for the treatment of DDD comprises one or more sgRNAs targeting exon 3 of cTNFRSF11A. In some embodiments, the CRISPR gene-editing system for the treatment of DDD comprises one or more sgRNAs targeting exon 4 of cTNFRSF11A. In some embodiments, the CRISPR gene-editing system for the treatment of DDD comprises one or more sgRNAs targeting exon 5 of cTNFRSF11A. In some embodiments, the CRISPR gene-editing system for the treatment of DDD comprises one or more sgRNAs targeting exon 6 of cTNFRSF11A. In some embodiments, the CRISPR gene-editing system for the treatment of DDD comprises one or more sgRNAs targeting exon 7 of cTNFRSF11A. In some embodiments, the CRISPR gene-editing system for the treatment of DDD comprises one or more sgRNAs targeting exon 8 of cTNFRSF11A. In some embodiments, the CRISPR gene-editing system for the treatment of DDD comprises one or more sgRNAs targeting exon 9 of cTNFRSF11A. In some embodiments, the CRISPR gene-editing system for the treatment of DDD comprises one or more sgRNAs targeting exon 10 of cTNFRSF11A. In some embodiments, the CRISPR gene-editing system for the treatment of DDD comprises one or more sgRNAs targeting exon 11 of cTNFRSF11A.

[0454] In some embodiments, the CRISPR gene-editing system for the treatment of DDD comprises one or more sgRNAs targeting exon 1 of eTNFRSF11A. In some embodiments, the CRISPR gene-editing system for the treatment of DDD comprises one or more sgRNAs targeting exon 2 of eTNFRSF11A. In some embodiments, the CRISPR gene-editing system for the treatment of DDD comprises one or more sgRNAs targeting exon 3 of eTNFRSF11A. In some embodiments, the CRISPR gene-editing system for the treatment of DDD comprises one or more sgRNAs targeting exon 4 of eTNFRSF11A. In some embodiments, the CRISPR gene-editing system for the treatment of DDD comprises one or more sgRNAs targeting exon 5 of eTNFRSF11A. In some embodiments, the CRISPR gene-editing system for the treatment of DDD comprises one or more sgRNAs targeting exon 6 of eTNFRSF11A. In some embodiments, the CRISPR gene-editing system for the treatment of DDD comprises one or more sgRNAs targeting exon 7 of eTNFRSF11A. In some embodiments, the CRISPR gene-editing system for the treatment of DDD comprises one or more sgRNAs targeting exon 8 of eTNFRSF11A. In some embodiments, the CRISPR gene-editing system for the treatment of DDD comprises one or more sgRNAs targeting exon 9 of eTNFRSF11A. In some embodiments, the CRISPR gene-editing system for the treatment of DDD comprises one or more sgRNAs targeting exon 10 of eTNFRSF11A.

[0455] In some embodiments, the CRISPR gene-editing system for the treatment of DDD comprises one or more sgRNAs targeting exon 1 of fTNFRSF11A. In some embodiments, the CRISPR gene-editing system for the treatment of DDD comprises one or more sgRNAs targeting exon 2 of fTNFRSF11A. In some embodiments, the CRISPR gene-editing system for the treatment of DDD comprises one or more sgRNAs targeting exon 3 of fTNFRSF11A. In some embodiments, the CRISPR gene-editing system for the treatment of DDD comprises one or more sgRNAs targeting exon 4 of fTNFRSF11A. In some embodiments, the CRISPR gene-editing system for the treatment of DDD comprises one or more sgRNAs targeting exon 5 of fTNFRSF11A. In some embodiments, the CRISPR gene-editing system for the treatment of DDD comprises one or more sgRNAs targeting exon 6 of fTNFRSF11A. In some embodiments, the CRISPR gene-editing system for the treatment of DDD comprises one or more sgRNAs targeting exon 7 of fTNFRSF11A. In some embodiments, the CRISPR gene-editing system for the treatment of DDD comprises one or more sgRNAs targeting exon 8 of fTNFRSF11A. In some embodiments, the CRISPR gene-editing system for the treatment of DDD comprises one or more sgRNAs targeting exon 9 of fTNFRSF11A. In some embodiments, the CRISPR gene-editing system for the treatment of DDD comprises one or more sgRNAs targeting exon 10 of fTNFRSF11A. In some embodiments, the CRISPR gene-editing system for the treatment of DDD comprises one or more sgRNAs targeting exon 11 of fTNFRSF11A.

### D. IDD

[0456] In one aspect, the present disclosure encompasses treatments for internal disc disruption (IDD). In some embodiments, the IDD treatment comprises a therapeutically effective amount of a Clustered Regularly Interspaced Short Palindromic Repeats (CRISPR) gene-editing system, the system comprising: (i) a CRISPR Associated (Cas) protein; and (ii) at least one guide RNA targeting IL1R1. In some embodiments, the IDD treatment comprises a CRISPR gene-editing system targeting hIL1R1. In some embodiments, the IDD treatment comprises a CRISPR gene-editing system targeting cIL1R1. In some embodiments, the IDD treatment comprises a CRISP gene-editing system R targeting eIL1R1. In some embodiments, the IDD treatment comprises a CRISPR gene-editing system targeting fIL1R1.

[0457] In some embodiments, the CRISPR gene-editing system for the treatment of IDD comprises one or more sgRNAs targeting exon 1 of hIL1R1. In some embodiments, the CRISPR gene-editing system for the treatment of IDD comprises one or more sgRNAs targeting exon 2 of hIL1R1. In some embodiments, the CRISPR gene-editing system for the treatment of IDD comprises one or more sgRNAs targeting exon 3 of hIL1R1. In some embodiments, the CRISPR gene-editing system for the treatment of IDD comprises one or more sgRNAs targeting exon 4 of hIL1R1. In some embodiments, the CRISPR gene-editing system for the treatment of IDD comprises one or more sgRNAs targeting exon 5 of hIL1R1. In some embodiments, the CRISPR gene-editing system for the treatment of IDD comprises one or more sgRNAs targeting exon 6 of hIL1R1. In some embodiments, the CRISPR gene-editing system for the treatment of IDD comprises one or more sgRNAs targeting exon 7 of hIL1R1. In some embodiments, the CRISPR gene-editing system for the treatment of IDD comprises one or more sgRNAs targeting exon 8 of hIL1R1. In some embodiments, the CRISPR gene-editing system for the treatment of IDD comprises one or more sgRNAs targeting exon 9 of hIL1R1. In some embodiments, the CRISPR gene-editing system for the treatment of IDD comprises one or more sgRNAs targeting exon 10 of hIL1R1. In some embodiments, the CRISPR gene-editing system for the treatment of IDD comprises one or more sgRNAs targeting exon 11 of hIL1R1. In some embodiments, the CRISPR gene-editing system for the treatment of IDD comprises one or more sgRNAs targeting exon 12 of hIL1R1. In some embodiments, the CRISPR gene-editing system for the treatment of IDD comprises one or more sgRNAs targeting exon 13 of hIL1R1. In some embodiments, the CRISPR gene-editing system for the treatment of IDD comprises one or more sgRNAs targeting exon 14 of hIL1R1. In some embodiments, the CRISPR gene-editing system for the treatment of IDD comprises one or more sgRNAs targeting exon 15 of hIL1R1. In some embodiments, the CRISPR gene-editing system for the treatment of IDD comprises one or more sgRNAs targeting exon 16 of hIL1R1. In some embodiments, the CRISPR gene-editing system for the treatment of IDD comprises one or more sgRNAs targeting exon 17 of hIL1R1. In some embodiments, the CRISPR gene-editing system for the treatment of IDD comprises one or more sgRNAs targeting exon 18 of hIL1R1. In some embodiments, the CRISPR gene-editing system for the treatment of IDD comprises one or more sgRNAs targeting exon 19 of hIL1R1. In some embodiments, the CRISPR gene-editing system for the treatment of IDD comprises one or more sgRNAs targeting exon 20 of hIL1R1. In some embodiments, the CRISPR gene-editing system for the treatment of IDD comprises one or more sgRNAs targeting exon 21 of hIL1R1.

[0458] In some embodiments, the CRISPR gene-editing system for the treatment of IDD comprises one or more sgRNAs targeting exon 1 of cIL1R1. In some embodiments, the CRISPR gene-editing system for the treatment of IDD comprises one or more sgRNAs targeting exon 2 of cIL1R1. In some embodiments, the CRISPR gene-editing system for the treatment of IDD comprises one or more sgRNAs targeting exon 3 of cIL1R1. In some embodiments, the CRISPR gene-editing system for the treatment of IDD comprises one or more sgRNAs targeting exon 4 of cIL1R1. In some embodiments, the CRISPR gene-editing system for the treatment of IDD comprises one or more sgRNAs targeting exon 5 of cIL1R1. In some embodiments, the CRISPR gene-editing system for the treatment of IDD comprises one or more sgRNAs targeting exon 6 of cIL1R1. In some embodiments, the CRISPR gene-editing system for the treatment of IDD comprises one or more sgRNAs targeting exon 7 of cIL1R1. In some embodiments, the CRISPR gene-editing system for the treatment of IDD comprises one or more sgRNAs targeting exon 8 of cIL1R1. In some embodiments, the CRISPR gene-editing system for the treatment of IDD comprises one or more sgRNAs targeting exon 9 of cIL1R1. In some embodiments, the CRISPR gene-editing system for the treatment of IDD comprises one or more sgRNAs targeting exon 10 of cIL1R1. In some embodiments, the CRISPR gene-editing system for the treatment of IDD comprises one or more sgRNAs targeting exon 11 of cIL1R1. In some embodiments, the CRISPR gene-editing system for the treatment of IDD comprises one or more sgRNAs targeting exon 12 of cIL1R1. In some embodiments, the CRISPR gene-editing system for the treatment of IDD comprises one or more sgRNAs targeting exon 13 of cIL1R1. In some embodiments, the CRISPR gene-editing system for the treatment of IDD comprises one or more sgRNAs targeting exon 14 of cIL1R1. In some embodiments, the CRISPR gene-editing system for the treatment of IDD comprises one or more sgRNAs targeting exon 15 of cIL1R1. In some embodiments, the CRISPR gene-editing system for the treatment of IDD comprises one or more sgRNAs targeting exon 16 of cIL1R1.

[0459] In some embodiments, the CRISPR gene-editing system for the treatment of IDD comprises one or more sgRNAs targeting exon 1 of eIL1R1. In some embodiments, the CRISPR gene-editing system for the treatment of IDD comprises one or more sgRNAs targeting exon 2 of eIL1R1. In some embodiments, the CRISPR gene-editing system for the treatment of IDD comprises one or more sgRNAs targeting exon 3 of eIL1R1. In some embodiments, the CRISPR gene-editing system for the treatment of IDD comprises one or more sgRNAs targeting exon 4 of eIL1R1. In some embodiments, the CRISPR gene-editing system for the treatment of IDD comprises one or more sgRNAs targeting exon 5 of eIL1R1. In some embodiments, the CRISPR gene-editing system for the treatment of IDD comprises one or more sgRNAs targeting exon 6 of eIL1R1. In some embodiments, the CRISPR gene-editing system for the treatment of IDD comprises one or more sgRNAs targeting exon 7 of eIL1R1. In some embodiments, the CRISPR gene-editing system for the treatment of IDD comprises one or more sgRNAs targeting exon 8 of eIL1R1. In some embodiments, the CRISPR gene-editing system for the treatment of IDD comprises one or more sgRNAs targeting exon 9 of eIL1R1. In some embodiments, the CRISPR gene-editing system for the treatment of IDD comprises one or more sgRNAs targeting exon 10 of eIL1R1. In some embodiments, the CRISPR gene-editing system for the treatment of IDD comprises one or more sgRNAs targeting exon 11 of eIL1R1. In some embodiments, the CRISPR gene-editing system for the treatment of IDD comprises one or more sgRNAs targeting exon 12 of eIL1R1. In some embodiments, the CRISPR gene-editing system for the treatment of IDD comprises one or more sgRNAs targeting exon 13 of eIL1R1. In some embodiments, the CRISPR gene-editing system for the treatment of IDD comprises one or more sgRNAs targeting exon 14 of eIL1R1. In some embodiments, the CRISPR gene-editing system for the treatment of IDD comprises one or more sgRNAs targeting exon 15 of eIL1R1.

[0460] In some embodiments, the CRISPR gene-editing system for the treatment of IDD comprises one or more sgRNAs targeting exon 1 of fIL1R1. In some embodiments, the CRISPR gene-editing system for the treatment of IDD comprises one or more sgRNAs targeting exon 2 of fIL1R1. In some embodiments, the CRISPR gene-editing system for the treatment of IDD comprises one or more sgRNAs targeting exon 3 of fIL1R1. In some embodiments, the CRISPR gene-editing system for the treatment of IDD comprises one or more sgRNAs targeting exon 4 of fIL1R1. In some embodiments, the CRISPR gene-editing system for the treatment of IDD comprises one or more sgRNAs targeting exon 5 of fIL1R1. In some embodiments, the CRISPR gene-editing system for the treatment of IDD comprises one or more sgRNAs targeting exon 6 of fIL1R1. In some embodiments, the CRISPR gene-editing system for the treatment of IDD comprises one or more sgRNAs targeting exon 7 of fIL1R1. In some embodiments, the CRISPR gene-editing system for the treatment of IDD comprises one or more sgRNAs targeting exon 8 of fIL1R1. In some embodiments, the CRISPR gene-editing system for the treatment of IDD comprises one or more sgRNAs targeting exon 9 of fIL1R1. In some embodiments, the CRISPR gene-editing system for the treatment of IDD comprises one or more sgRNAs targeting exon 10 of fIL1R1. In some embodiments, the CRISPR gene-editing system for the treatment of IDD comprises one or more sgRNAs targeting exon 11 of fIL1R1. In some embodiments, the CRISPR gene-editing system for the treatment of IDD comprises one or more sgRNAs targeting exon 12 of fIL1R1. In some embodiments, the CRISPR gene-editing system for the treatment of IDD comprises one or more sgRNAs targeting exon 13 of fIL1R1. In some embodiments, the CRISPR gene-editing system for the treatment of IDD comprises one or more sgRNAs targeting exon 14 of fIL1R1. In some embodiments, the CRISPR gene-editing system for the treatment of IDD comprises one or more sgRNAs targeting exon 15 of fIL1R1. In some embodiments, the CRISPR gene-editing system for the treatment of IDD comprises one or more sgRNAs targeting exon 16 of fIL1R1. In some embodiments, the CRISPR gene-editing system for the treatment of IDD comprises one or more sgRNAs targeting exon 17 of fIL1R1. In some embodiments, the CRISPR gene-editing system for the treatment of IDD comprises one or more sgRNAs targeting exon 18 of fIL1R1.

[0461] In some embodiments, the CRISPR gene-editing system for the treatment of IDD comprises one or more sgRNAs targeting IL1RAP. In some embodiments, the CRISPR gene-editing system for the treatment of IDD comprises one or more sgRNAs targeting hIL1RAP. In some embodiments, the CRISPR gene-editing system for the treatment of IDD comprises one or more sgRNAs targeting cIL1RAP. In some embodiments, the CRISPR gene-editing system for the treatment of IDD comprises one or more sgRNAs targeting eIL1RAP. In some embodiments, the CRISPR gene-editing system for the treatment of IDD comprises one or more sgRNAs targeting fIL1RAP.

[0462] In some embodiments, the CRISPR gene-editing system for the treatment of IDD comprises one or more sgRNAs targeting exon 1 of hIL1RAP. In some embodiments, the CRISPR gene-editing system for the treatment of IDD comprises one or more sgRNAs targeting exon 2 of hIL1RAP. In some embodiments, the CRISPR gene-editing system for the treatment of IDD comprises one or more sgRNAs targeting exon 3 of hIL1RAP. In some embodiments, the CRISPR gene-editing system for the treatment of IDD comprises one or more sgRNAs targeting exon 4 of hIL1RAP. In some embodiments, the CRISPR gene-editing system for the treatment of IDD comprises one or more sgRNAs targeting exon 5 of hIL1RAP. In some embodiments, the CRISPR gene-editing system for the treatment of IDD comprises one or more sgRNAs targeting exon 6 of hIL1RAP. In some embodiments, the CRISPR gene-editing system for the treatment of IDD comprises one or more sgRNAs targeting exon 7 of hIL1RAP. In some embodiments, the CRISPR gene-editing system for the treatment of IDD comprises one or more sgRNAs targeting exon 8 of hIL1RAP. In some embodiments, the CRISPR gene-editing system for the treatment of IDD comprises one or more sgRNAs targeting exon 9 of hIL1RAP. In some embodiments, the CRISPR gene-editing system for the treatment of IDD comprises one or more sgRNAs targeting exon 10 of hIL1RAP. In some embodiments, the CRISPR gene-editing system for the treatment of IDD comprises one or more sgRNAs targeting exon 11 of hIL1RAP. In some embodiments, the CRISPR gene-editing system for the treatment of IDD comprises one or more sgRNAs targeting exon 12 of hIL1RAP. In some embodiments, the CRISPR gene-editing system for the treatment of IDD comprises one or more sgRNAs targeting exon 13 of hIL1RAP. In some embodiments, the CRISPR gene-editing system for the treatment of IDD comprises one or more sgRNAs targeting exon 14 of hIL1RAP. In some embodiments, the CRISPR gene-editing system for the treatment of IDD comprises one or more sgRNAs targeting exon 15 of hIL1RAP. In some embodiments, the CRISPR gene-editing system for the treatment of IDD comprises one or more sgRNAs targeting exon 16 of hIL1RAP. In some embodiments, the CRISPR gene-editing system for the treatment of IDD comprises one or more sgRNAs targeting exon 17 of hIL1RAP.

[0463] In some embodiments, the CRISPR gene-editing system for the treatment of IDD comprises one or more sgRNAs targeting exon 1 of cIL1RAP. In some embodiments, the CRISPR gene-editing system for the treatment of IDD comprises one or more sgRNAs targeting exon 2 of cIL1RAP. In some embodiments, the CRISPR gene-editing system for the treatment of IDD comprises one or more sgRNAs targeting exon 3 of cIL1RAP. In some embodiments, the CRISPR gene-editing system for the treatment of IDD comprises one or more sgRNAs targeting exon 4 of cIL1RAP. In some embodiments, the CRISPR gene-editing system for the treatment of IDD comprises one or more sgRNAs targeting exon 5 of cIL1RAP. In some embodiments, the CRISPR gene-editing system for the treatment of IDD comprises one or more sgRNAs targeting exon 6 of cIL1RAP. In some embodiments, the CRISPR gene-editing system for the treatment of IDD comprises one or more sgRNAs targeting exon 7 of cIL1RAP. In some embodiments, the CRISPR gene-editing system for the treatment of IDD comprises one or more sgRNAs targeting exon 8 of cIL1RAP. In some embodiments, the CRISPR gene-editing system for the treatment of IDD comprises one or more sgRNAs targeting exon 9 of cIL1RAP. In some embodiments, the CRISPR gene-editing system for the treatment of IDD comprises one or more sgRNAs targeting exon 10 of cIL1RAP. In some embodiments, the CRISPR gene-editing system for the treatment of IDD comprises one or more sgRNAs targeting exon 11 of cIL1RAP. In some embodiments, the CRISPR gene-editing system for the treatment of IDD comprises one or more sgRNAs targeting exon 12 of cIL1RAP. In some embodiments, the CRISPR gene-editing system for the treatment of IDD comprises one or more sgRNAs targeting exon 13 of cIL1RAP. In some embodiments, the CRISPR gene-editing system for the treatment of IDD comprises one or more sgRNAs targeting exon 14 of cIL1RAP. In some embodiments, the CRISPR gene-editing system for the treatment of IDD comprises one or more sgRNAs targeting exon 15 of cIL1RAP. In some embodiments, the CRISPR gene-editing system for the treatment of IDD comprises one or more sgRNAs targeting exon 16 of cIL1RAP.

[0464] In some embodiments, the CRISPR gene-editing system for the treatment of IDD comprises one or more sgRNAs targeting exon 1 of eIL1RAP. In some embodiments, the CRISPR gene-editing system for the treatment of IDD comprises one or more sgRNAs targeting exon 2 of eIL1RAP. In some embodiments, the CRISPR gene-editing system for the treatment of IDD comprises one or more sgRNAs targeting exon 3 of eIL1RAP. In some embodiments, the CRISPR gene-editing system for the treatment of IDD comprises one or more sgRNAs targeting exon 4 of eIL1RAP. In some embodiments, the CRISPR gene-editing system for the treatment of IDD comprises one or more sgRNAs targeting exon 5 of eIL1RAP. In some embodiments, the CRISPR gene-editing system for the treatment of IDD comprises one or more sgRNAs targeting exon 6 of eIL1RAP. In some embodiments, the CRISPR gene-editing system for the treatment of IDD comprises one or more sgRNAs targeting exon 7 of eIL1RAP. In some embodiments, the CRISPR gene-editing system for the treatment of IDD comprises one or more sgRNAs targeting exon 8 of eIL1RAP. In some embodiments, the CRISPR gene-editing system for the treatment of IDD comprises one or more sgRNAs targeting exon 9 of eIL1RAP. In some embodiments, the CRISPR gene-editing system for the treatment of IDD comprises one or more sgRNAs targeting exon 10 of eIL1RAP. In some embodiments, the CRISPR gene-editing system for the treatment of IDD comprises one or more sgRNAs targeting exon 11 of eIL1RAP. In some embodiments, the CRISPR gene-editing system for the treatment of IDD comprises one or more sgRNAs targeting exon 12 of eIL1RAP. In some embodiments, the CRISPR gene-editing system for the treatment of IDD comprises one or more sgRNAs targeting exon 13 of eIL1RAP.

[0465] In some embodiments, the CRISPR gene-editing system for the treatment of IDD comprises one or more sgRNAs targeting exon 1 of fIL1RAP. In some embodiments, the CRISPR gene-editing system for the treatment of IDD comprises one or more sgRNAs targeting exon 2 of fIL1RAP. In some embodiments, the CRISPR gene-editing system for the treatment of IDD comprises one or more sgRNAs targeting exon 3 of fIL1RAP. In some embodiments, the CRISPR gene-editing system for the treatment of IDD comprises one or more sgRNAs targeting exon 4 of fIL1RAP. In some embodiments, the CRISPR gene-editing system for the treatment of IDD comprises one or more sgRNAs targeting exon 5 of fIL1RAP. In some embodiments, the CRISPR gene-editing system for the treatment of IDD comprises one or more sgRNAs targeting exon 6 of fIL1RAP. In some embodiments, the CRISPR gene-editing system for the treatment of IDD comprises one or more sgRNAs targeting exon 7 of fIL1RAP. In some embodiments, the CRISPR gene-editing system for the treatment of IDD comprises one or more sgRNAs targeting exon 8 of fIL1RAP. In some embodiments, the CRISPR gene-editing system for the treatment of IDD comprises one or more sgRNAs targeting exon 9 of fIL1RAP. In some embodiments, the CRISPR gene-editing system for the treatment of IDD comprises one or more sgRNAs targeting exon 10 of fIL1RAP. In some embodiments, the CRISPR gene-editing system for the treatment of IDD comprises one or more sgRNAs targeting exon 11 of fIL1RAP. In some embodiments, the CRISPR gene-editing system for the treatment of IDD comprises one or more sgRNAs targeting exon 12 of fIL1RAP. In some embodiments, the CRISPR gene-editing system for the treatment of IDD comprises one or more sgRNAs targeting exon 13 of fIL1RAP. In some embodiments, the CRISPR gene-editing system for the treatment of IDD comprises one or more sgRNAs targeting exon 14 of fIL1RAP.

[0466] In some embodiments, the CRISPR gene-editing system for the treatment of IDD comprises one or more sgRNAs targeting TGFBR1. In some embodiments, the CRISPR gene-editing system for the treatment of IDD comprises one or more sgRNAs targeting hTGFBR1. In some embodiments, the CRISPR gene-editing system for the treatment of IDD comprises one or more sgRNAs targeting cTGFBR1. In some embodiments, the CRISPR gene-editing system for the treatment of IDD comprises one or more sgRNAs targeting e TGFBR1. In some embodiments, the CRISPR gene-editing system for the treatment of IDD comprises one or more sgRNAs targeting fTGFBR1.

[0467] In some embodiments, the CRISPR gene-editing system for the treatment of IDD comprises one or more sgRNAs targeting exon 1 of hTGFBR1. In some embodiments, the CRISPR gene-editing system for the treatment of IDD comprises one or more sgRNAs targeting exon 2 of hTGFBR1. In some embodiments, the CRISPR gene-editing system for the treatment of IDD comprises one or more sgRNAs targeting exon 3 of hTGFBR1. In some embodiments, the CRISPR gene-editing system for the treatment of IDD comprises one or more sgRNAs targeting exon 4 of hTGFBR1. In some embodiments, the CRISPR gene-editing system for the treatment of IDD comprises one or more sgRNAs targeting exon 5 of hTGFBR1. In some embodiments, the CRISPR gene-editing system for the treatment of IDD comprises one or more sgRNAs targeting exon 6 of hTGFBR1. In some embodiments, the CRISPR gene-editing system for the treatment of IDD comprises one or more sgRNAs targeting exon 7 of hTGFBR1. In some embodiments, the CRISPR gene-editing system for the treatment of IDD comprises one or more sgRNAs targeting exon 8 of hTGFBR1. In some embodiments, the CRISPR gene-editing system for the treatment of IDD comprises one or more sgRNAs targeting exon 9 of hTGFBR1. In some embodiments, the CRISPR gene-editing system for the treatment of IDD comprises one or more sgRNAs targeting exon 10 of hTGFBR1. In some embodiments, the CRISPR gene-editing system for the treatment of IDD comprises one or more sgRNAs targeting exon 11 of hTGFBR1.

[0468] In some embodiments, the CRISPR gene-editing system for the treatment of IDD comprises one or more sgRNAs targeting exon 1 of cTGFBR1. In some embodiments, the CRISPR gene-editing system for the treatment of IDD comprises one or more sgRNAs targeting exon 2 of cTGFBR1. In some embodiments, the CRISPR gene-editing system for the treatment of IDD comprises one or more sgRNAs targeting exon 3 of cTGFBR1. In some embodiments, the CRISPR gene-editing system for the treatment of IDD comprises one or more sgRNAs targeting exon 4 of cTGFBR1. In some embodiments, the CRISPR gene-editing system for the treatment of IDD comprises one or more sgRNAs targeting exon 5 of cTGFBR1. In some embodiments, the CRISPR gene-editing system for the treatment of IDD comprises one or more sgRNAs targeting exon 6 of cTGFBR1. In some embodiments, the CRISPR gene-editing system for the treatment of IDD comprises one or more sgRNAs targeting exon 7 of cTGFBR1. In some embodiments, the CRISPR gene-editing system for the treatment of IDD comprises one or more sgRNAs targeting exon 8 of cTGFBR1. In some embodiments, the CRISPR gene-editing system for the treatment of IDD comprises one or more sgRNAs targeting exon 9 of cTGFBR1.

[0469] In some embodiments, the CRISPR gene-editing system for the treatment of IDD comprises one or more sgRNAs targeting exon 1 of eTGFBR1. In some embodiments, the CRISPR gene-editing system for the treatment of IDD comprises one or more sgRNAs targeting exon 2 of eTGFBR1. In some embodiments, the CRISPR gene-editing system for the treatment of IDD comprises one or more sgRNAs targeting exon 3 of eTGFBR1. In some embodiments, the CRISPR gene-editing system for the treatment of IDD comprises one or more sgRNAs targeting exon 4 of eTGFBR1. In some embodiments, the CRISPR gene-editing system for the treatment of IDD comprises one or more sgRNAs targeting exon 5 of eTGFBR1. In some embodiments, the CRISPR gene-editing system for the treatment of IDD comprises one or more sgRNAs targeting exon 6 of eTGFBR1. In some embodiments, the CRISPR gene-editing system for the treatment of IDD comprises one or more sgRNAs targeting exon 7 of eTGFBR1. In some embodiments, the CRISPR gene-editing system for the treatment of IDD comprises one or more sgRNAs targeting exon 8 of eTGFBR1. In some embodiments, the CRISPR gene-editing system for the treatment of IDD comprises one or more sgRNAs targeting exon 9 of eTGFBR1. In some embodiments, the CRISPR gene-editing system for the treatment of IDD comprises one or more sgRNAs targeting exon 10 of eTGFBR1. In some embodiments, the CRISPR gene-editing system for the treatment of IDD comprises one or more sgRNAs targeting exon 11 of eTGFBR1. In some embodiments, the CRISPR gene-editing system for the treatment of IDD comprises one or more sgRNAs targeting exon 12 of eTGFBR1.

[0470] In some embodiments, the CRISPR gene-editing system for the treatment of IDD comprises one or more sgRNAs targeting exon 1 of fTGFBR1. In some embodiments, the CRISPR gene-editing system for the treatment of IDD comprises one or more sgRNAs targeting exon 2 of fTGFBR1. In some embodiments, the CRISPR gene-editing system for the treatment of IDD comprises one or more sgRNAs targeting exon 3 of fTGFBR1. In some embodiments, the CRISPR gene-editing system for the treatment of IDD comprises one or more sgRNAs targeting exon 4 of fTGFBR1. In some embodiments, the CRISPR gene-editing system for the treatment of IDD comprises one or more sgRNAs targeting exon 5 of fTGFBR1. In some embodiments, the CRISPR gene-editing system for the treatment of IDD comprises one or more sgRNAs targeting exon 6 of fTGFBR1. In some embodiments, the CRISPR gene-editing system for the treatment of IDD comprises one or more sgRNAs targeting exon 7 of fTGFBR1. In some embodiments, the CRISPR gene-editing system for the treatment of IDD comprises one or more sgRNAs targeting exon 8 of fTGFBR1. In some embodiments, the CRISPR gene-editing system for the treatment of IDD comprises one or more sgRNAs targeting exon 9 of fTGFBR1. In some embodiments, the CRISPR gene-editing system for the treatment of IDD comprises one or more sgRNAs targeting exon 10 of fTGFBR1. In some embodiments, the CRISPR gene-editing system for the treatment of IDD comprises one or more sgRNAs targeting exon 11 of fTGFBR1.

[0471] In some embodiments, the CRISPR gene-editing system for the treatment of IDD comprises one or more sgRNAs targeting TGFBR2. In some embodiments, the CRISPR gene-editing system for the treatment of IDD comprises one or more sgRNAs targeting hTGFBR2. In some embodiments, the CRISPR gene-editing system for the treatment of IDD comprises one or more sgRNAs targeting cTGFBR2. In some embodiments, the CRISPR gene-editing system for the treatment of IDD comprises one or more sgRNAs targeting eTGFBR2. In some embodiments, the CRISPR gene-editing system for the treatment of IDD comprises one or more sgRNAs targeting fTGFBR2.

[0472] In some embodiments, the CRISPR gene-editing system for the treatment of IDD comprises one or more sgRNAs targeting exon 1 of hTGFBR2. In some embodiments, the CRISPR gene-editing system for the treatment of IDD comprises one or more sgRNAs targeting exon 2 of hTGFBR2. In some embodiments, the CRISPR gene-editing system for the treatment of IDD comprises one or more sgRNAs targeting exon 3 of hTGFBR2. In some embodiments, the CRISPR gene-editing system for the treatment of IDD comprises one or more sgRNAs targeting exon 4 of hTGFBR2. In some embodiments, the CRISPR gene-editing system for the treatment of IDD comprises one or more sgRNAs targeting exon 5 of hTGFBR2. In some embodiments, the CRISPR gene-editing system for the treatment of IDD comprises one or more sgRNAs targeting exon 6 of hTGFBR2. In some embodiments, the CRISPR gene-editing system for the treatment of IDD comprises one or more sgRNAs targeting exon 7 of hTGFBR2. In some embodiments, the CRISPR gene-editing system for the treatment of IDD comprises one or more sgRNAs targeting exon 8 of hTGFBR2. In some embodiments, the CRISPR gene-editing system for the treatment of IDD comprises one or more sgRNAs targeting exon 9 of hTGFBR2.

[0473] In some embodiments, the CRISPR gene-editing system for the treatment of IDD comprises one or more sgRNAs targeting exon 1 of cTGFBR2. In some embodiments, the CRISPR gene-editing system for the treatment of IDD comprises one or more sgRNAs targeting exon 2 of cTGFBR2. In some embodiments, the CRISPR gene-editing system for the treatment of IDD comprises one or more sgRNAs targeting exon 3 of cTGFBR2. In some embodiments, the CRISPR gene-editing system for the treatment of IDD comprises one or more sgRNAs targeting exon 4 of cTGFBR2. In some embodiments, the CRISPR gene-editing system for the treatment of IDD comprises one or more sgRNAs targeting exon 5 of cTGFBR2. In some embodiments, the CRISPR gene-editing system for the treatment of IDD comprises one or more sgRNAs targeting exon 6 of cTGFBR2. In some embodiments, the CRISPR gene-editing system for the treatment of IDD comprises one or more sgRNAs targeting exon 7 of cTGFBR2. In some embodiments, the CRISPR gene-editing system for the treatment of IDD comprises one or more sgRNAs targeting exon 8 of cTGFBR2.

[0474] In some embodiments, the CRISPR gene-editing system for the treatment of IDD comprises one or more sgRNAs targeting exon 1 of eTGFBR2. In some embodiments, the CRISPR gene-editing system for the treatment of IDD comprises one or more sgRNAs targeting exon 2 of eTGFBR2. In some embodiments, the CRISPR gene-editing system for the treatment of IDD comprises one or more sgRNAs targeting exon 3 of eTGFBR2. In some embodiments, the CRISPR gene-editing system for the treatment of IDD comprises one or more sgRNAs targeting exon 4 of eTGFBR2. In some embodiments, the CRISPR gene-editing system for the treatment of IDD comprises one or more sgRNAs targeting exon 5 of eTGFBR2. In some embodiments, the CRISPR gene-editing system for the treatment of IDD comprises one or more sgRNAs targeting exon 6 of eTGFBR2. In some embodiments, the CRISPR gene-editing system for the treatment of IDD comprises one or more sgRNAs targeting exon 7 of eTGFBR2. In some embodiments, the CRISPR gene-editing system for the treatment of IDD comprises one or more sgRNAs targeting exon 8 of eTGFBR2. In some embodiments, the CRISPR gene-editing system for the treatment of IDD comprises one or more sgRNAs targeting exon 9 of eTGFBR2. In some embodiments, the CRISPR gene-editing system for the treatment of IDD comprises one or more sgRNAs targeting exon 10 of eTGFBR2.

[0475] In some embodiments, the CRISPR gene-editing system for the treatment of IDD comprises one or more sgRNAs targeting exon 1 of fTGFBR2. In some embodiments, the CRISPR gene-editing system for the treatment of IDD comprises one or more sgRNAs targeting exon 2 of fTGFBR2. In some embodiments, the CRISPR gene-editing system for the treatment of IDD comprises one or more sgRNAs targeting exon 3 of fTGFBR2. In some embodiments, the CRISPR gene-editing system for the treatment of IDD comprises one or more sgRNAs targeting exon 4 of fTGFBR2. In some embodiments, the CRISPR gene-editing system for the treatment of IDD comprises one or more sgRNAs targeting exon 5 of fTGFBR2. In some embodiments, the CRISPR gene-editing system for the treatment of IDD comprises one or more sgRNAs targeting exon 6 of fTGFBR2. In some embodiments, the CRISPR gene-editing system for the treatment of IDD comprises one or more sgRNAs targeting exon 7 of fTGFBR2. In some embodiments, the CRISPR gene-editing system for the treatment of IDD comprises one or more sgRNAs targeting exon 8 of fTGFBR2.

[0476] In some embodiments, the CRISPR gene-editing system for the treatment of IDD comprises one or more sgRNAs targeting IL6R. In some embodiments, the CRISPR gene-editing system for the treatment of IDD comprises one or more sgRNAs targeting hIL6R. In some embodiments, the CRISPR gene-editing system for the treatment of IDD comprises one or more sgRNAs targeting cIL6R. In some embodiments, the CRISPR gene-editing system for the treatment of IDD comprises one or more sgRNAs targeting eIL6R. In some embodiments, the CRISPR gene-editing system for the treatment of IDD comprises one or more sgRNAs targeting fIL6R.

[0477] In some embodiments, the CRISPR gene-editing system for the treatment of IDD comprises one or more sgRNAs targeting exon 1 of hIL6R. In some embodiments, the CRISPR gene-editing system for the treatment of IDD comprises one or more sgRNAs targeting exon 2 of hIL6R. In some embodiments, the CRISPR gene-editing system for the treatment of IDD comprises one or more sgRNAs targeting exon 3 of hIL6R. In some embodiments, the CRISPR gene-editing system for the treatment of IDD comprises one or more sgRNAs targeting exon 4 of hIL6R. In some embodiments, the CRISPR gene-editing system for the treatment of IDD comprises one or more sgRNAs targeting exon 5 of hIL6R. In some embodiments, the CRISPR gene-editing system for the treatment of IDD comprises one or more sgRNAs targeting exon 6 of hIL6R. In some embodiments, the CRISPR gene-editing system for the treatment of IDD comprises one or more sgRNAs targeting exon 7 of hIL6R. In some embodiments, the CRISPR gene-editing system for the treatment of IDD comprises one or more sgRNAs targeting exon 8 of hIL6R. In some embodiments, the CRISPR gene-editing system for the treatment of IDD comprises one or more sgRNAs targeting exon 9 of hIL6R. In some embodiments, the CRISPR gene-editing system for the treatment of IDD comprises one or more sgRNAs targeting exon 10 of hIL6R. In some embodiments, the CRISPR gene-editing system for the treatment of IDD comprises one or more sgRNAs targeting exon 11 of hIL6R In some embodiments, the CRISPR gene-editing system for the treatment of IDD comprises one or more sgRNAs targeting exon 12 of hIL6R. In some embodiments, the CRISPR gene-editing system for the treatment of IDD comprises one or more sgRNAs targeting exon 13 of hIL6R. In some embodiments, the CRISPR gene-editing system for the treatment of IDD comprises one or more sgRNAs targeting exon 14 of hIL6R. In some embodiments, the CRISPR gene-editing system for the treatment of IDD comprises one or more sgRNAs targeting exon 15 of hIL6R.

[0478] In some embodiments, the CRISPR gene-editing system for the treatment of IDD comprises one or more sgRNAs targeting exon 1 of cIL6R. In some embodiments, the CRISPR gene-editing system for the treatment of IDD comprises one or more sgRNAs targeting exon 2 of cIL6R. In some embodiments, the CRISPR gene-editing system for the treatment of IDD comprises one or more sgRNAs targeting exon 3 of cIL6R. In some embodiments, the CRISPR gene-editing system for the treatment of IDD comprises one or more sgRNAs targeting exon 4 of cIL6R. In some embodiments, the CRISPR gene-editing system for the treatment of IDD comprises one or more sgRNAs targeting exon 5 of cIL6R. In some embodiments, the CRISPR gene-editing system for the treatment of IDD comprises one or more sgRNAs targeting exon 6 of cIL6R. In some embodiments, the CRISPR gene-editing system for the treatment of IDD comprises one or more sgRNAs targeting exon 7 of cIL6R. In some embodiments, the CRISPR gene-editing system for the treatment of IDD comprises one or more sgRNAs targeting exon 8 of cIL6R. In some embodiments, the CRISPR gene-editing system for the treatment of IDD comprises one or more sgRNAs targeting exon 9 of cIL6R. In some embodiments, the CRISPR gene-editing system for the treatment of IDD comprises one or more sgRNAs targeting exon 10 of cIL6R. In some embodiments, the CRISPR gene-editing system for the treatment of IDD comprises one or more sgRNAs targeting exon 11 of cIL6R. In some embodiments, the CRISPR gene-editing system for the treatment of IDD comprises one or more sgRNAs targeting exon 12 of cIL6R. In some embodiments, the CRISPR gene-editing system for the treatment of IDD comprises one or more sgRNAs targeting exon 13 of cIL6R.

[0479] In some embodiments, the CRISPR gene-editing system for the treatment of IDD comprises one or more sgRNAs targeting exon 1 of eIL6R. In some embodiments, the CRISPR gene-editing system for the treatment of IDD comprises one or more sgRNAs targeting exon 2 of eIL6R. In some embodiments, the CRISPR gene-editing system for the treatment of IDD comprises one or more sgRNAs targeting exon 3 of eIL6R. In some embodiments, the CRISPR gene-editing system for the treatment of IDD comprises one or more sgRNAs targeting exon 4 of eIL6R. In some embodiments, the CRISPR gene-editing system for the treatment of IDD comprises one or more sgRNAs targeting exon 5 of eIL6R. In some embodiments, the CRISPR gene-editing system for the treatment of IDD comprises one or more sgRNAs targeting exon 6 of eIL6R. In some embodiments, the CRISPR gene-editing system for the treatment of IDD comprises one or more sgRNAs targeting exon 7 of eIL6R. In some embodiments, the CRISPR gene-editing system for the treatment of IDD comprises one or more sgRNAs targeting exon 8 of eIL6R. In some embodiments, the CRISPR gene-editing system for the treatment of IDD comprises one or more sgRNAs targeting exon 9 of eIL6R. In some embodiments, the CRISPR gene-editing system for the treatment of IDD comprises one or more sgRNAs targeting exon 10 of eIL6R. In some embodiments, the CRISPR gene-editing system for the treatment of IDD comprises one or more sgRNAs targeting exon 11 of eIL6R.

[0480] In some embodiments, the CRISPR gene-editing system for the treatment of IDD comprises one or more sgRNAs targeting exon 1 of fIL6R. In some embodiments, the CRISPR gene-editing system for the treatment of IDD comprises one or more sgRNAs targeting exon 2 of fIL6R. In some embodiments, the CRISPR gene-editing system for the treatment of IDD comprises one or more sgRNAs targeting exon 3 of fIL6R. In some embodiments, the CRISPR gene-editing system for the treatment of IDD comprises one or more sgRNAs targeting exon 4 of fIL6R. In some embodiments, the CRISPR gene-editing system for the treatment of IDD comprises one or more sgRNAs targeting exon 5 of fIL6R. In some embodiments, the CRISPR gene-editing system for the treatment of IDD comprises one or more sgRNAs targeting exon 6 of fIL6R. In some embodiments, the CRISPR gene-editing system for the treatment of IDD comprises one or more sgRNAs targeting exon 7 of fIL6R. In some embodiments, the CRISPR gene-editing system for the treatment of IDD comprises one or more sgRNAs targeting exon 8 of fIL6R. In some embodiments, the CRISPR gene-editing system for the treatment of IDD comprises one or more sgRNAs targeting exon 9 of fIL6R. In some embodiments, the CRISPR gene-editing system for the treatment of IDD comprises one or more sgRNAs targeting exon 10 of fIL6R.

[0481] In some embodiments, the CRISPR gene-editing system for the treatment of IDD comprises one or more sgRNAs targeting IL6ST. In some embodiments, the CRISPR gene-editing system for the treatment of IDD comprises one or more sgRNAs targeting hIL6ST. In some embodiments, the CRISPR gene-editing system for the treatment of IDD comprises one or more sgRNAs targeting cIL6ST. In some embodiments, the CRISPR gene-editing system for the treatment of IDD comprises one or more sgRNAs targeting eIL6ST. In some embodiments, the CRISPR gene-editing system for the treatment of IDD comprises one or more sgRNAs targeting fIL6ST.

[0482] In some embodiments, the CRISPR gene-editing system for the treatment of IDD comprises one or more sgRNAs targeting exon 1 of hIL6ST. In some embodiments, the CRISPR gene-editing system for the treatment of IDD comprises one or more sgRNAs targeting exon 2 of hIL6ST. In some embodiments, the CRISPR gene-editing system for the treatment of IDD comprises one or more sgRNAs targeting exon 3 of hIL6ST. In some embodiments, the CRISPR gene-editing system for the treatment of IDD comprises one or more sgRNAs targeting exon 4 of hIL6ST. In some embodiments, the CRISPR gene-editing system for the treatment of IDD comprises one or more sgRNAs targeting exon 5 of hIL6ST. In some embodiments, the CRISPR gene-editing system for the treatment of IDD comprises one or more sgRNAs targeting exon 6 of hIL6ST. In some embodiments, the CRISPR gene-editing system for the treatment of IDD comprises one or more sgRNAs targeting exon 7 of hIL6ST. In some embodiments, the CRISPR gene-editing system for the treatment of IDD comprises one or more sgRNAs targeting exon 8 of hIL6ST. In some embodiments, the CRISPR gene-editing system for the treatment of IDD comprises one or more sgRNAs targeting exon 9 of hIL6ST. In some embodiments, the CRISPR gene-editing system for the treatment of IDD comprises one or more sgRNAs targeting exon 10 of hIL6ST. In some embodiments, the CRISPR gene-editing system for the treatment of IDD comprises one or more sgRNAs targeting exon 11 of hIL6ST. In some embodiments, the CRISPR gene-editing system for the treatment of IDD comprises one or more sgRNAs targeting exon 12 of hIL6ST. In some embodiments, the CRISPR gene-editing system for the treatment of IDD comprises one or more sgRNAs targeting exon 13 of hIL6ST. In some embodiments, the CRISPR gene-editing system for the treatment of IDD comprises one or more sgRNAs targeting exon 14 of hIL6ST. In some embodiments, the CRISPR gene-editing system for the treatment of IDD comprises one or more sgRNAs targeting exon 15 of hIL6ST. In some embodiments, the CRISPR gene-editing system for the treatment of IDD comprises one or more sgRNAs targeting exon 16 of hIL6ST. In some embodiments, the CRISPR gene-editing system for the treatment of IDD comprises one or more sgRNAs targeting exon 17 of hIL6ST. In some embodiments, the CRISPR gene-editing system for the treatment of IDD comprises one or more sgRNAs targeting exon 18 of hIL6ST. In some embodiments, the CRISPR gene-editing system for the treatment of IDD comprises one or more sgRNAs targeting exon 19 of hIL6ST.

[0483] In some embodiments, the CRISPR gene-editing system for the treatment of IDD comprises one or more sgRNAs targeting exon 1 of cIL6ST. In some embodiments, the CRISPR gene-editing system for the treatment of IDD comprises one or more sgRNAs targeting exon 2 of cIL6ST. In some embodiments, the CRISPR gene-editing system for the treatment of IDD comprises one or more sgRNAs targeting exon 3 of cIL6ST. In some embodiments, the CRISPR gene-editing system for the treatment of IDD comprises one or more sgRNAs targeting exon 4 of cIL6ST. In some embodiments, the CRISPR gene-editing system for the treatment of IDD comprises one or more sgRNAs targeting exon 5 of cIL6ST. In some embodiments, the CRISPR gene-editing system for the treatment of IDD comprises one or more sgRNAs targeting exon 6 of cIL6ST. In some embodiments, the CRISPR gene-editing system for the treatment of IDD comprises one or more sgRNAs targeting exon 7 of cIL6ST. In some embodiments, the CRISPR gene-editing system for the treatment of IDD comprises one or more sgRNAs targeting exon 8 of cIL6ST. In some embodiments, the CRISPR gene-editing system for the treatment of IDD comprises one or more sgRNAs targeting exon 9 of cIL6ST. In some embodiments, the CRISPR gene-editing system for the treatment of IDD comprises one or more sgRNAs targeting exon 10 of cIL6ST. In some embodiments, the CRISPR gene-editing system for the treatment of IDD comprises one or more sgRNAs targeting exon 11 of cIL6ST In some embodiments, the CRISPR gene-editing system for the treatment of IDD comprises one or more sgRNAs targeting exon 12 of cIL6ST. In some embodiments, the CRISPR gene-editing system for the treatment of IDD comprises one or more sgRNAs targeting exon 13 of cIL6ST. In some embodiments, the CRISPR gene-editing system for the treatment of IDD comprises one or more sgRNAs targeting exon 14 of cIL6ST. In some embodiments, the CRISPR gene-editing system for the treatment of IDD comprises one or more sgRNAs targeting exon 15 of cIL6ST. In some embodiments, the CRISPR gene-editing system for the treatment of IDD comprises one or more sgRNAs targeting exon 16 of cIL6ST. In some embodiments, the CRISPR gene-editing system for the treatment of IDD comprises one or more sgRNAs targeting exon 17 of cIL6ST. In some embodiments, the CRISPR gene-editing system for the treatment of IDD comprises one or more sgRNAs targeting exon 18 of cIL6ST.

[0484] In some embodiments, the CRISPR gene-editing system for the treatment of IDD comprises one or more sgRNAs targeting exon 1 of eIL6ST. In some embodiments, the CRISPR gene-editing system for the treatment of IDD comprises one or more sgRNAs targeting exon 2 of eIL6ST. In some embodiments, the CRISPR gene-editing system for the treatment of IDD comprises one or more sgRNAs targeting exon 3 of eIL6ST. In some embodiments, the CRISPR gene-editing system for the treatment of IDD comprises one or more sgRNAs targeting exon 4 of eIL6ST. In some embodiments, the CRISPR gene-editing system for the treatment of IDD comprises one or more sgRNAs targeting exon 5 of eIL6ST. In some embodiments, the CRISPR gene-editing system for the treatment of IDD comprises one or more sgRNAs targeting exon 6 of eIL6ST. In some embodiments, the CRISPR gene-editing system for the treatment of IDD comprises one or more sgRNAs targeting exon 7 of eIL6ST. In some embodiments, the CRISPR gene-editing system for the treatment of IDD comprises one or more sgRNAs targeting exon 8 of eIL6ST. In some embodiments, the CRISPR gene-editing system for the treatment of IDD comprises one or more sgRNAs targeting exon 9 of eIL6ST. In some embodiments, the CRISPR gene-editing system for the treatment of IDD comprises one or more sgRNAs targeting exon 10 of eIL6ST. In some embodiments, the CRISPR gene-editing system for the treatment of IDD comprises one or more sgRNAs targeting exon 11 of eIL6ST In some embodiments, the CRISPR gene-editing system for the treatment of IDD comprises one or more sgRNAs targeting exon 12 of eIL6ST. In some embodiments, the CRISPR gene-editing system for the treatment of IDD comprises one or more sgRNAs targeting exon 13 of eIL6ST. In some embodiments, the CRISPR gene-editing system for the treatment of IDD comprises one or more sgRNAs targeting exon 14 of eIL6ST. In some embodiments, the CRISPR gene-editing system for the treatment of IDD comprises one or more sgRNAs targeting exon 15 of eIL6ST. In some embodiments, the CRISPR gene-editing system for the treatment of IDD comprises one or more sgRNAs targeting exon 16 of eIL6ST. In some embodiments, the CRISPR gene-editing system for the treatment of IDD comprises one or more sgRNAs targeting exon 17 of eIL6ST. In some embodiments, the CRISPR gene-editing system for the treatment of IDD comprises one or more sgRNAs targeting exon 18 of eIL6ST.

[0485] In some embodiments, the CRISPR gene-editing system for the treatment of IDD comprises one or more sgRNAs targeting exon 1 of fIL6ST. In some embodiments, the CRISPR gene-editing system for the treatment of IDD comprises one or more sgRNAs targeting exon 2 of fIL6ST. In some embodiments, the CRISPR gene-editing system for the treatment of IDD comprises one or more sgRNAs targeting exon 3 of fIL6ST. In some embodiments, the CRISPR gene-editing system for the treatment of IDD comprises one or more sgRNAs targeting exon 4 of fIL6ST. In some embodiments, the CRISPR gene-editing system for the treatment of IDD comprises one or more sgRNAs targeting exon 5 of fIL6ST. In some embodiments, the CRISPR gene-editing system for the treatment of IDD comprises one or more sgRNAs targeting exon 6 of fIL6ST. In some embodiments, the CRISPR gene-editing system for the treatment of IDD comprises one or more sgRNAs targeting exon 7 of fIL6ST. In some embodiments, the CRISPR gene-editing system for the treatment of IDD comprises one or more sgRNAs targeting exon 8 of fIL6ST. In some embodiments, the CRISPR gene-editing system for the treatment of IDD comprises one or more sgRNAs targeting exon 9 of fIL6ST. In some embodiments, the CRISPR gene-editing system for the treatment of IDD comprises one or more sgRNAs targeting exon 10 of fIL6ST. In some embodiments, the CRISPR gene-editing system for the treatment of IDD comprises one or more sgRNAs targeting exon 11 of fIL6ST In some embodiments, the CRISPR gene-editing system for the treatment of IDD comprises one or more sgRNAs targeting exon 12 of fIL6ST. In some embodiments, the CRISPR gene-editing system for the treatment of IDD comprises one or more sgRNAs targeting exon 13 of fIL6ST. In some embodiments, the CRISPR gene-editing system for the treatment of IDD comprises one or more sgRNAs targeting exon 14 of fIL6ST. In some embodiments, the CRISPR gene-editing system for the treatment of IDD comprises one or more sgRNAs targeting exon 15 of fIL6ST. In some embodiments, the CRISPR gene-editing system for the treatment of IDD comprises one or more sgRNAs targeting exon 16 of fIL6ST. In some embodiments, the CRISPR gene-editing system for the treatment of IDD comprises one or more sgRNAs targeting exon 17 of fIL6ST. In some embodiments, the CRISPR gene-editing system for the treatment of IDD comprises one or more sgRNAs targeting exon 18 of fIL6ST. In some embodiments, the CRISPR gene-editing system for the treatment of IDD comprises one or more sgRNAs targeting exon 19 of fIL6ST. In some embodiments, the CRISPR gene-editing system for the treatment of IDD comprises one or more sgRNAs targeting exon 20 of fIL6ST.

[0486] In some embodiments, the CRISPR gene-editing system for the treatment of IDD comprises one or more sgRNAs targeting TNFRSF1A. In some embodiments, the CRISPR gene-editing system for the treatment of IDD comprises one or more sgRNAs targeting hTNFRSF1A. In some embodiments, the CRISPR gene-editing system for the treatment of IDD comprises one or more sgRNAs targeting cTNFRSF1A. In some embodiments, the CRISPR gene-editing system for the treatment of IDD comprises one or more sgRNAs targeting eTNFRSF1A. In some embodiments, the CRISPR gene-editing system for the treatment of IDD comprises one or more sgRNAs targeting fTNFRSF1A.

[0487] In some embodiments, the CRISPR gene-editing system for the treatment of IDD comprises one or more sgRNAs targeting exon 1 of hTNFRSF1A. In some embodiments, the CRISPR gene-editing system for the treatment of IDD comprises one or more sgRNAs targeting exon 2 of hTNFRSF1A. In some embodiments, the CRISPR gene-editing system for the treatment of IDD comprises one or more sgRNAs targeting exon 3 of hTNFRSF1A. In some embodiments, the CRISPR gene-editing system for the treatment of IDD comprises one or more sgRNAs targeting exon 4 of hTNFRSF1A. In some embodiments, the CRISPR gene-editing system for the treatment of IDD comprises one or more sgRNAs targeting exon 5 of hTNFRSF1A. In some embodiments, the CRISPR gene-editing system for the treatment of IDD comprises one or more sgRNAs targeting exon 6 of hTNFRSF1A. In some embodiments, the CRISPR gene-editing system for the treatment of IDD comprises one or more sgRNAs targeting exon 7 of hTNFRSF1A. In some embodiments, the CRISPR gene-editing system for the treatment of IDD comprises one or more sgRNAs targeting exon 8 of hTNFRSF1A. In some embodiments, the CRISPR gene-editing system for the treatment of IDD comprises one or more sgRNAs targeting exon 9 of hTNFRSF1A. In some embodiments, the CRISPR gene-editing system for the treatment of IDD comprises one or more sgRNAs targeting exon 10 of hTNFRSF1A. In some embodiments, the CRISPR gene-editing system for the treatment of IDD comprises one or more sgRNAs targeting exon 11 of hTNFRSF1A.

[0488] In some embodiments, the CRISPR gene-editing system for the treatment of IDD comprises one or more sgRNAs targeting exon 1 of cTNFRSF1A. In some embodiments, the CRISPR gene-editing system for the treatment of IDD comprises one or more sgRNAs targeting exon 2 of cTNFRSF1A. In some embodiments, the CRISPR gene-editing system for the treatment of IDD comprises one or more sgRNAs targeting exon 3 of cTNFRSF1A. In some embodiments, the CRISPR gene-editing system for the treatment of IDD comprises one or more sgRNAs targeting exon 4 of cTNFRSF1A. In some embodiments, the CRISPR gene-editing system for the treatment of IDD comprises one or more sgRNAs targeting exon 5 of cTNFRSF1A. In some embodiments, the CRISPR gene-editing system for the treatment of IDD comprises one or more sgRNAs targeting exon 6 of cTNFRSF1A. In some embodiments, the CRISPR gene-editing system for the treatment of IDD comprises one or more sgRNAs targeting exon 7 of cTNFRSF1A. In some embodiments, the CRISPR gene-editing system for the treatment of IDD comprises one or more sgRNAs targeting exon 8 of cTNFRSF1A. In some embodiments, the CRISPR gene-editing system for the treatment of IDD comprises one or more sgRNAs targeting exon 9 of cTNFRSF1A. In some embodiments, the CRISPR gene-editing system for the treatment of IDD comprises one or more sgRNAs targeting exon 10 of cTNFRSF1A. In some embodiments, the CRISPR gene-editing system for the treatment of IDD comprises one or more sgRNAs targeting exon 11 of cTNFRSF1A.

[0489] In some embodiments, the CRISPR gene-editing system for the treatment of IDD comprises one or more sgRNAs targeting exon 1 of eTNFRSF1A. In some embodiments, the CRISPR gene-editing system for the treatment of IDD comprises one or more sgRNAs targeting exon 2 of eTNFRSF1A. In some embodiments, the CRISPR gene-editing system for the treatment of IDD comprises one or more sgRNAs targeting exon 3 of eTNFRSF1A. In some embodiments, the CRISPR gene-editing system for the treatment of IDD comprises one or more sgRNAs targeting exon 4 of eTNFRSF1A. In some embodiments, the CRISPR gene-editing system for the treatment of IDD comprises one or more sgRNAs targeting exon 5 of eTNFRSF1A. In some embodiments, the CRISPR gene-editing system for the treatment of IDD comprises one or more sgRNAs targeting exon 6 of eTNFRSF1A. In some embodiments, the CRISPR gene-editing system for the treatment of IDD comprises one or more sgRNAs targeting exon 7 of eTNFRSF1A. In some embodiments, the CRISPR gene-editing system for the treatment of IDD comprises one or more sgRNAs targeting exon 8 of eTNFRSF1A. In some embodiments, the CRISPR gene-editing system for the treatment of IDD comprises one or more sgRNAs targeting exon 9 of eTNFRSF1A. In some embodiments, the CRISPR gene-editing system for the treatment of IDD comprises one or more sgRNAs targeting exon 10 of eTNFRSF1A.

[0490] In some embodiments, the CRISPR gene-editing system for the treatment of IDD comprises one or more sgRNAs targeting exon 1 of fTNFRSF1A. In some embodiments, the CRISPR gene-editing system for the treatment of IDD comprises one or more sgRNAs targeting exon 2 of fTNFRSF1A. In some embodiments, the CRISPR gene-editing system for the treatment of IDD comprises one or more sgRNAs targeting exon 3 of fTNFRSF1A. In some embodiments, the CRISPR gene-editing system for the treatment of IDD comprises one or more sgRNAs targeting exon 4 of fINFRSF1A. In some embodiments, the CRISPR gene-editing system for the treatment of IDD comprises one or more sgRNAs targeting exon 5 of fTNFRSF1A. In some embodiments, the CRISPR gene-editing system for the treatment of IDD comprises one or more sgRNAs targeting exon 6 of fTNFRSF1A. In some embodiments, the CRISPR gene-editing system for the treatment of IDD comprises one or more sgRNAs targeting exon 7 of fTNFRSF1A. In some embodiments, the CRISPR gene-editing system for the treatment of IDD comprises one or more sgRNAs targeting exon 8 of fTNFRSF1A. In some embodiments, the CRISPR gene-editing system for the treatment of IDD comprises one or more sgRNAs targeting exon 9 of fINFRSF1A. In some embodiments, the CRISPR gene-editing system for the treatment of IDD comprises one or more sgRNAs targeting exon 10 of fTNFRSF1A.

[0491] In some embodiments, the CRISPR gene-editing system for the treatment of IDD comprises one or more sgRNAs targeting TNFRSF1B. In some embodiments, the CRISPR gene-editing system for the treatment of IDD comprises one or more sgRNAs targeting hTNFRSF1B. In some embodiments, the CRISPR gene-editing system for the treatment of IDD comprises one or more sgRNAs targeting cTNFRSF1B. In some embodiments, the CRISPR gene-editing system for the treatment of IDD comprises one or more sgRNAs targeting eTNFRSF1B. In some embodiments, the CRISPR gene-editing system for the treatment of IDD comprises one or more sgRNAs targeting fTNFRSF1B.

[0492] In some embodiments, the CRISPR gene-editing system for the treatment of IDD comprises one or more sgRNAs targeting exon 1 of hTNFRSF1B. In some embodiments, the CRISPR gene-editing system for the treatment of IDD comprises one or more sgRNAs targeting exon 2 of hTNFRSF1B. In some embodiments, the CRISPR gene-editing system for the treatment of IDD comprises one or more sgRNAs targeting exon 3 of hTNFRSF1B. In some embodiments, the CRISPR gene-editing system for the treatment of IDD comprises one or more sgRNAs targeting exon 4 of hTNFRSF1B. In some embodiments, the CRISPR gene-editing system for the treatment of IDD comprises one or more sgRNAs targeting exon 5 of hTNFRSF1B. In some embodiments, the CRISPR gene-editing system for the treatment of IDD comprises one or more sgRNAs targeting exon 6 of hTNFRSF1B. In some embodiments, the CRISPR gene-editing system for the treatment of IDD comprises one or more sgRNAs targeting exon 7 of hTNFRSF1B. In some embodiments, the CRISPR gene-editing system for the treatment of IDD comprises one or more sgRNAs targeting exon 8 of hTNFRSF1B. In some embodiments, the CRISPR gene-editing system for the treatment of IDD comprises one or more sgRNAs targeting exon 9 of hTNFRSF1B. In some embodiments, the CRISPR gene-editing system for the treatment of IDD comprises one or more sgRNAs targeting exon 10 of hTNFRSF1B. In some embodiments, the CRISPR gene-editing system for the treatment of IDD comprises one or more sgRNAs targeting exon 11 of hTNFRSF1B In some embodiments, the CRISPR gene-editing system for the treatment of IDD comprises one or more sgRNAs targeting exon 12 of hTNFRSF1B. In some embodiments, the CRISPR gene-editing system for the treatment of IDD comprises one or more sgRNAs targeting exon 13 of hTNFRSF1B.

[0493] In some embodiments, the CRISPR gene-editing system for the treatment of IDD comprises one or more sgRNAs targeting exon 1 of cTNFRSF1B. In some embodiments, the CRISPR gene-editing system for the treatment of IDD comprises one or more sgRNAs targeting exon 2 of cTNFRSF1B. In some embodiments, the CRISPR gene-editing system for the treatment of IDD comprises one or more sgRNAs targeting exon 3 of cTNFRSF1B. In some embodiments, the CRISPR gene-editing system for the treatment of IDD comprises one or more sgRNAs targeting exon 4 of cTNFRSF1B. In some embodiments, the CRISPR gene-editing system for the treatment of IDD comprises one or more sgRNAs targeting exon 5 of cTNFRSF1B. In some embodiments, the CRISPR gene-editing system for the treatment of IDD comprises one or more sgRNAs targeting exon 6 of cTNFRSF1B. In some embodiments, the CRISPR gene-editing system for the treatment of IDD comprises one or more sgRNAs targeting exon 7 of cTNFRSF1B. In some embodiments, the CRISPR gene-editing system for the treatment of IDD comprises one or more sgRNAs targeting exon 8 of cTNFRSF1B. In some embodiments, the CRISPR gene-editing system for the treatment of IDD comprises one or more sgRNAs targeting exon 9 of cTNFRSF1B. In some embodiments, the CRISPR gene-editing system for the treatment of IDD comprises one or more sgRNAs targeting exon 10 of cTNFRSF1B. In some embodiments, the CRISPR gene-editing system for the treatment of IDD comprises one or more sgRNAs targeting exon 11 of cTNFRSF1B.

[0494] In some embodiments, the CRISPR gene-editing system for the treatment of IDD comprises one or more sgRNAs targeting exon 1 of eTNFRSF1B. In some embodiments, the CRISPR gene-editing system for the treatment of IDD comprises one or more sgRNAs targeting exon 2 of eTNFRSF1B. In some embodiments, the CRISPR gene-editing system for the treatment of IDD comprises one or more sgRNAs targeting exon 3 of eTNFRSF1B. In some embodiments, the CRISPR gene-editing system for the treatment of IDD comprises one or more sgRNAs targeting exon 4 of eTNFRSF1B. In some embodiments, the CRISPR gene-editing system for the treatment of IDD comprises one or more sgRNAs targeting exon 5 of eTNFRSF1B. In some embodiments, the CRISPR gene-editing system for the treatment of IDD comprises one or more sgRNAs targeting exon 6 of eTNFRSF1B. In some embodiments, the CRISPR gene-editing system for the treatment of IDD comprises one or more sgRNAs targeting exon 7 of eTNFRSF1B. In some embodiments, the CRISPR gene-editing system for the treatment of IDD comprises one or more sgRNAs targeting exon 8 of eTNFRSF1B. In some embodiments, the CRISPR gene-editing system for the treatment of IDD comprises one or more sgRNAs targeting exon 9 of eTNFRSF1B. In some embodiments, the CRISPR gene-editing system for the treatment of IDD comprises one or more sgRNAs targeting exon 10 of eTNFRSF1B. In some embodiments, the CRISPR gene-editing system for the treatment of IDD comprises one or more sgRNAs targeting exon 11 of eTNFRSF1B.

[0495] In some embodiments, the CRISPR gene-editing system for the treatment of IDD comprises one or more sgRNAs targeting exon 1 of fTNFRSF1B. In some embodiments, the CRISPR gene-editing system for the treatment of IDD comprises one or more sgRNAs targeting exon 2 of fTNFRSF1B. In some embodiments, the CRISPR gene-editing system for the treatment of IDD comprises one or more sgRNAs targeting exon 3 of fTNFRSF1B. In some embodiments, the CRISPR gene-editing system for the treatment of IDD comprises one or more sgRNAs targeting exon 4 of fTNFRSF1B. In some embodiments, the CRISPR gene-editing system for the treatment of IDD comprises one or more sgRNAs targeting exon 5 of fTNFRSF1B. In some embodiments, the CRISPR gene-editing system for the treatment of IDD comprises one or more sgRNAs targeting exon 6 of fTNFRSF1B. In some embodiments, the CRISPR gene-editing system for the treatment of IDD comprises one or more sgRNAs targeting exon 7 of fTNFRSF1B. In some embodiments, the CRISPR gene-editing system for the treatment of IDD comprises one or more sgRNAs targeting exon 8 of fTNFRSF1B. In some embodiments, the CRISPR gene-editing system for the treatment of IDD comprises one or more sgRNAs targeting exon 9 of fTNFRSF1B. In some embodiments, the CRISPR gene-editing system for the treatment of IDD comprises one or more sgRNAs targeting exon 10 of fTNFRSF1B.

[0496] In some embodiments, the CRISPR gene-editing system for the treatment of IDD comprises one or more sgRNAs targeting TNFRSF3. In some embodiments, the CRISPR gene-editing system for the treatment of IDD comprises one or more sgRNAs targeting hTNFRSF3. In some embodiments, the CRISPR gene-editing system for the treatment of IDD comprises one or more sgRNAs targeting cTNFRSF3. In some embodiments, the CRISPR gene-editing system for the treatment of IDD comprises one or more sgRNAs targeting eTNFRSF3. In some embodiments, the CRISPR gene-editing system for the treatment of IDD comprises one or more sgRNAs targeting fTNFRSF3.

[0497] In some embodiments, the CRISPR gene-editing system for the treatment of IDD comprises one or more sgRNAs targeting exon 1 of hTNFRSF3. In some embodiments, the CRISPR gene-editing system for the treatment of IDD comprises one or more sgRNAs targeting exon 2 of hTNFRSF3. In some embodiments, the CRISPR gene-editing system for the treatment of IDD comprises one or more sgRNAs targeting exon 3 of hTNFRSF3. In some embodiments, the CRISPR gene-editing system for the treatment of IDD comprises one or more sgRNAs targeting exon 4 of hTNFRSF3. In some embodiments, the CRISPR gene-editing system for the treatment of IDD comprises one or more sgRNAs targeting exon 5 of hTNFRSF3. In some embodiments, the CRISPR gene-editing system for the treatment of IDD comprises one or more sgRNAs targeting exon 6 of hTNFRSF3. In some embodiments, the CRISPR gene-editing system for the treatment of IDD comprises one or more sgRNAs targeting exon 7 of hTNFRSF3. In some embodiments, the CRISPR gene-editing system for the treatment of IDD comprises one or more sgRNAs targeting exon 8 of hTNFRSF3. In some embodiments, the CRISPR gene-editing system for the treatment of IDD comprises one or more sgRNAs targeting exon 9 of hTNFRSF3. In some embodiments, the CRISPR gene-editing system for the treatment of IDD comprises one or more sgRNAs targeting exon 10 of hTNFRSF3. In some embodiments, the CRISPR gene-editing system for the treatment of IDD comprises one or more sgRNAs targeting exon 11 of hTNFRSF3. In some embodiments, the CRISPR gene-editing system for the treatment of IDD comprises one or more sgRNAs targeting exon 12 of hTNFRSF3.

[0498] In some embodiments, the CRISPR gene-editing system for the treatment of IDD comprises one or more sgRNAs targeting exon 1 of cTNFRSF3. In some embodiments, the CRISPR gene-editing system for the treatment of IDD comprises one or more sgRNAs targeting exon 2 of cTNFRSF3. In some embodiments, the CRISPR gene-editing system for the treatment of IDD comprises one or more sgRNAs targeting exon 3 of cTNFRSF3. In some embodiments, the CRISPR gene-editing system for the treatment of IDD comprises one or more sgRNAs targeting exon 4 of cTNFRSF3. In some embodiments, the CRISPR gene-editing system for the treatment of IDD comprises one or more sgRNAs targeting exon 5 of cTNFRSF3. In some embodiments, the CRISPR gene-editing system for the treatment of IDD comprises one or more sgRNAs targeting exon 6 of cTNFRSF3. In some embodiments, the CRISPR gene-editing system for the treatment of IDD comprises one or more sgRNAs targeting exon 7 of cTNFRSF3. In some embodiments, the CRISPR gene-editing system for the treatment of IDD comprises one or more sgRNAs targeting exon 8 of cTNFRSF3. In some embodiments, the CRISPR gene-editing system for the treatment of IDD comprises one or more sgRNAs targeting exon 9 of cTNFRSF3. In some embodiments, the CRISPR gene-editing system for the treatment of IDD comprises one or more sgRNAs targeting exon 10 of cTNFRSF3.

[0499] In some embodiments, the CRISPR gene-editing system for the treatment of IDD comprises one or more sgRNAs targeting exon 1 of eTNFRSF3. In some embodiments, the CRISPR gene-editing system for the treatment of IDD comprises one or more sgRNAs targeting exon 2 of eTNFRSF3. In some embodiments, the CRISPR gene-editing system for the treatment of IDD comprises one or more sgRNAs targeting exon 3 of eTNFRSF3. In some embodiments, the CRISPR gene-editing system for the treatment of IDD comprises one or more sgRNAs targeting exon 4 of eTNFRSF3. In some embodiments, the CRISPR gene-editing system for the treatment of IDD comprises one or more sgRNAs targeting exon 5 of eTNFRSF3. In some embodiments, the CRISPR gene-editing system for the treatment of IDD comprises one or more sgRNAs targeting exon 6 of eTNFRSF3. In some embodiments, the CRISPR gene-editing system for the treatment of IDD comprises one or more sgRNAs targeting exon 7 of eTNFRSF3. In some embodiments, the CRISPR gene-editing system for the treatment of IDD comprises one or more sgRNAs targeting exon 8 of eTNFRSF3. In some embodiments, the CRISPR gene-editing system for the treatment of IDD comprises one or more sgRNAs targeting exon 9 of eTNFRSF3. In some embodiments, the CRISPR gene-editing system for the treatment of IDD comprises one or more sgRNAs targeting exon 10 of eTNFRSF3.

[0500] In some embodiments, the CRISPR gene-editing system for the treatment of IDD comprises one or more sgRNAs targeting exon 1 of fTNFRSF3. In some embodiments, the CRISPR gene-editing system for the treatment of IDD comprises one or more sgRNAs targeting exon 2 of fTNFRSF3. In some embodiments, the CRISPR gene-editing system for the treatment of IDD comprises one or more sgRNAs targeting exon 3 of fTNFRSF3. In some embodiments, the CRISPR gene-editing system for the treatment of IDD comprises one or more sgRNAs targeting exon 4 of fTNFRSF3. In some embodiments, the CRISPR gene-editing system for the treatment of IDD comprises one or more sgRNAs targeting exon 5 of fTNFRSF3. In some embodiments, the CRISPR gene-editing system for the treatment of IDD comprises one or more sgRNAs targeting exon 6 of fTNFRSF3. In some embodiments, the CRISPR gene-editing system for the treatment of IDD comprises one or more sgRNAs targeting exon 7 of fTNFRSF3. In some embodiments, the CRISPR gene-editing system for the treatment of IDD comprises one or more sgRNAs targeting exon 8 of fTNFRSF3. In some embodiments, the CRISPR gene-editing system for the treatment of IDD comprises one or more sgRNAs targeting exon 9 of fTNFRSF3. In some embodiments, the CRISPR gene-editing system for the treatment of IDD comprises one or more sgRNAs targeting exon 10 of fTNFRSF3.

[0501] In some embodiments, the CRISPR gene-editing system for the treatment of IDD comprises one or more sgRNAs targeting TNFRSF4. In some embodiments, the CRISPR gene-editing system for the treatment of IDD comprises one or more sgRNAs targeting hTNFRSF4. In some embodiments, the CRISPR gene-editing system for the treatment of IDD comprises one or more sgRNAs targeting cTNFRSF4. In some embodiments, the CRISPR gene-editing system for the treatment of IDD comprises one or more sgRNAs targeting eTNFRSF4. In some embodiments, the CRISPR gene-editing system for the treatment of IDD comprises one or more sgRNAs targeting fTNFRSF4.

[0502] In some embodiments, the CRISPR gene-editing system for the treatment of IDD comprises one or more sgRNAs targeting exon 1 of hTNFRSF4. In some embodiments, the CRISPR gene-editing system for the treatment of IDD comprises one or more sgRNAs targeting exon 2 of hTNFRSF4. In some embodiments, the CRISPR gene-editing system for the treatment of IDD comprises one or more sgRNAs targeting exon 3 of hTNFRSF4. In some embodiments, the CRISPR gene-editing system for the treatment of IDD comprises one or more sgRNAs targeting exon 4 of hTNFRSF4. In some embodiments, the CRISPR gene-editing system for the treatment of IDD comprises one or more sgRNAs targeting exon 5 of hTNFRSF4. In some embodiments, the CRISPR gene-editing system for the treatment of IDD comprises one or more sgRNAs targeting exon 6 of hTNFRSF4.

[0503] In some embodiments, the CRISPR gene-editing system for the treatment of IDD comprises one or more sgRNAs targeting exon 1 of cTNFRSF4. In some embodiments, the CRISPR gene-editing system for the treatment of IDD comprises one or more sgRNAs targeting exon 2 of cTNFRSF4. In some embodiments, the CRISPR gene-editing system for the treatment of IDD comprises one or more sgRNAs targeting exon 3 of cTNFRSF4. In some embodiments, the CRISPR gene-editing system for the treatment of IDD comprises one or more sgRNAs targeting exon 4 of cTNFRSF4. In some embodiments, the CRISPR gene-editing system for the treatment of IDD comprises one or more sgRNAs targeting exon 5 of cTNFRSF4. In some embodiments, the CRISPR gene-editing system for the treatment of IDD comprises one or more sgRNAs targeting exon 6 of cTNFRSF4. In some embodiments, the CRISPR gene-editing system for the treatment of IDD comprises one or more sgRNAs targeting exon 7 of cTNFRSF4.

[0504] In some embodiments, the CRISPR gene-editing system for the treatment of IDD comprises one or more sgRNAs targeting exon 1 of eTNFRSF4. In some embodiments, the CRISPR gene-editing system for the treatment of IDD comprises one or more sgRNAs targeting exon 2 of eTNFRSF4. In some embodiments, the CRISPR gene-editing system for the treatment of IDD comprises one or more sgRNAs targeting exon 3 of eTNFRSF4. In some embodiments, the CRISPR gene-editing system for the treatment of IDD comprises one or more sgRNAs targeting exon 4 of eTNFRSF4. In some embodiments, the CRISPR gene-editing system for the treatment of IDD comprises one or more sgRNAs targeting exon 5 of eTNFRSF4. In some embodiments, the CRISPR gene-editing system for the treatment of IDD comprises one or more sgRNAs targeting exon 6 of eTNFRSF4. In some embodiments, the CRISPR gene-editing system for the treatment of IDD comprises one or more sgRNAs targeting exon 7 of eTNFRSF4.

[0505] In some embodiments, the CRISPR gene-editing system for the treatment of IDD comprises one or more sgRNAs targeting exon 1 of fTNFRSF4. In some embodiments, the CRISPR gene-editing system for the treatment of IDD comprises one or more sgRNAs targeting exon 2 of fTNFRSF4. In some embodiments, the CRISPR gene-editing system for the treatment of IDD comprises one or more sgRNAs targeting exon 3 of fTNFRSF4. In some embodiments, the CRISPR gene-editing system for the treatment of IDD comprises one or more sgRNAs targeting exon 4 of fTNFRSF4. In some embodiments, the CRISPR gene-editing system for the treatment of IDD comprises one or more sgRNAs targeting exon 5 of fTNFRSF4. In some embodiments, the CRISPR gene-editing system for the treatment of IDD comprises one or more sgRNAs targeting exon 6 of fTNFRSF4. In some embodiments, the CRISPR gene-editing system for the treatment of IDD comprises one or more sgRNAs targeting exon 7 of fTNFRSF4.

[0506] In some embodiments, the CRISPR gene-editing system for the treatment of IDD comprises one or more sgRNAs targeting TNFRSF11A. In some embodiments, the CRISPR gene-editing system for the treatment of IDD comprises one or more sgRNAs targeting hTNFRSF11A. In some embodiments, the CRISPR gene-editing system for the treatment of IDD comprises one or more sgRNAs targeting cTNFRSF11A. In some embodiments, the CRISPR gene-editing system for the treatment of IDD comprises one or more sgRNAs targeting eTNFRSF11A. In some embodiments, the CRISPR gene-editing system for the treatment of IDD comprises one or more sgRNAs targeting fTNFRSF11A.

[0507] In some embodiments, the CRISPR gene-editing system for the treatment of IDD comprises one or more sgRNAs targeting exon 1 of hTNFRSF11A. In some embodiments, the CRISPR gene-editing system for the treatment of IDD comprises one or more sgRNAs targeting exon 2 of hTNFRSF11A. In some embodiments, the CRISPR gene-editing system for the treatment of IDD comprises one or more sgRNAs targeting exon 3 of hTNFRSF11A. In some embodiments, the CRISPR gene-editing system for the treatment of IDD comprises one or more sgRNAs targeting exon 4 of hTNFRSF11A. In some embodiments, the CRISPR gene-editing system for the treatment of IDD comprises one or more sgRNAs targeting exon 5 of hTNFRSF11A. In some embodiments, the CRISPR gene-editing system for the treatment of IDD comprises one or more sgRNAs targeting exon 6 of hTNFRSF11A. In some embodiments, the CRISPR gene-editing system for the treatment of IDD comprises one or more sgRNAs targeting exon 7 of hTNFRSF11A. In some embodiments, the CRISPR gene-editing system for the treatment of IDD comprises one or more sgRNAs targeting exon 8 of hTNFRSF11A. In some embodiments, the CRISPR gene-editing system for the treatment of IDD comprises one or more sgRNAs targeting exon 9 of hTNFRSF11A. In some embodiments, the CRISPR gene-editing system for the treatment of IDD comprises one or more sgRNAs targeting exon 10 of hTNFRSF11A. In some embodiments, the CRISPR gene-editing system for the treatment of IDD comprises one or more sgRNAs targeting exon 11 of hTNFRSF11A. In some embodiments, the CRISPR gene-editing system for the treatment of IDD comprises one or more sgRNAs targeting exon 12 of hTNFRSF11A.

[0508] In some embodiments, the CRISPR gene-editing system for the treatment of IDD comprises one or more sgRNAs targeting exon 1 of cTNFRSF11A. In some embodiments, the CRISPR gene-editing system for the treatment of IDD comprises one or more sgRNAs targeting exon 2 of cTNFRSF11A. In some embodiments, the CRISPR gene-editing system for the treatment of IDD comprises one or more sgRNAs targeting exon 3 of cTNFRSF11A. In some embodiments, the CRISPR gene-editing system for the treatment of IDD comprises one or more sgRNAs targeting exon 4 of cTNFRSF11A. In some embodiments, the CRISPR gene-editing system for the treatment of IDD comprises one or more sgRNAs targeting exon 5 of cTNFRSF11A. In some embodiments, the CRISPR gene-editing system for the treatment of IDD comprises one or more sgRNAs targeting exon 6 of cTNFRSF11A. In some embodiments, the CRISPR gene-editing system for the treatment of IDD comprises one or more sgRNAs targeting exon 7 of cTNFRSF11A. In some embodiments, the CRISPR gene-editing system for the treatment of IDD comprises one or more sgRNAs targeting exon 8 of cTNFRSF11A. In some embodiments, the CRISPR gene-editing system for the treatment of IDD comprises one or more sgRNAs targeting exon 9 of cTNFRSF11A. In some embodiments, the CRISPR gene-editing system for the treatment of IDD comprises one or more sgRNAs targeting exon 10 of cTNFRSF11A. In some embodiments, the CRISPR gene-editing system for the treatment of IDD comprises one or more sgRNAs targeting exon 11 of cTNFRSF11A.

[0509] In some embodiments, the CRISPR gene-editing system for the treatment of IDD comprises one or more sgRNAs targeting exon 1 of eTNFRSF11A. In some embodiments, the CRISPR gene-editing system for the treatment of IDD comprises one or more sgRNAs targeting exon 2 of eTNFRSF11A. In some embodiments, the CRISPR gene-editing system for the treatment of IDD comprises one or more sgRNAs targeting exon 3 of eTNFRSF11A. In some embodiments, the CRISPR gene-editing system for the treatment of IDD comprises one or more sgRNAs targeting exon 4 of eTNFRSF11A. In some embodiments, the CRISPR gene-editing system for the treatment of IDD comprises one or more sgRNAs targeting exon 5 of eTNFRSF11A. In some embodiments, the CRISPR gene-editing system for the treatment of IDD comprises one or more sgRNAs targeting exon 6 of eTNFRSF11A. In some embodiments, the CRISPR gene-editing system for the treatment of IDD comprises one or more sgRNAs targeting exon 7 of eTNFRSF11A. In some embodiments, the CRISPR gene-editing system for the treatment of IDD comprises one or more sgRNAs targeting exon 8 of eTNFRSF11A. In some embodiments, the CRISPR gene-editing system for the treatment of IDD comprises one or more sgRNAs targeting exon 9 of eTNFRSF11A. In some embodiments, the CRISPR gene-editing system for the treatment of IDD comprises one or more sgRNAs targeting exon 10 of eTNFRSF11A.

[0510] In some embodiments, the CRISPR gene-editing system for the treatment of IDD comprises one or more sgRNAs targeting exon 1 of fTNFRSF11A. In some embodiments, the CRISPR gene-editing system for the treatment of IDD comprises one or more sgRNAs targeting exon 2 of fTNFRSF11A. In some embodiments, the CRISPR gene-editing system for the treatment of IDD comprises one or more sgRNAs targeting exon 3 of fTNFRSF11A. In some embodiments, the CRISPR gene-editing system for the treatment of IDD comprises one or more sgRNAs targeting exon 4 of fTNFRSF11A. In some embodiments, the CRISPR gene-editing system for the treatment of IDD comprises one or more sgRNAs targeting exon 5 of fTNFRSF11A. In some embodiments, the CRISPR gene-editing system for the treatment of IDD comprises one or more sgRNAs targeting exon 6 of fTNFRSF11A. In some embodiments, the CRISPR gene-editing system for the treatment of IDD comprises one or more sgRNAs targeting exon 7 of fTNFRSF11A. In some embodiments, the CRISPR gene-editing system for the treatment of IDD comprises one or more sgRNAs targeting exon 8 of fTNFRSF11A. In some embodiments, the CRISPR gene-editing system for the treatment of IDD comprises one or more sgRNAs targeting exon 9 of fTNFRSF11A. In some embodiments, the CRISPR gene-editing system for the treatment of IDD comprises one or more sgRNAs targeting exon 10 of fTNFRSF11A. In some embodiments, the CRISPR gene-editing system for the treatment of IDD comprises one or more sgRNAs targeting exon 11 of fTNFRSF11A.

### VI. Delivery

### A. Viral Vectors

[0511] In one aspect, the present disclosure encompasses methods of delivery of a CRISPR gene-editing system targeting a gene selected from IL1R1, IL1R2, IL1RAP, IL1RL1, TGFBR1, TGFBR2, IL6R, IL6ST, TNFRSF1A, TNFRSF1B, TNFRSF3, TNFRSF4, TNFRSF11A and combinations thereof using one or more recombinant viral particle. In some embodiments, the one of more viral vectors comprise a recombinant virus selected from a retrovirus, an adenovirus, an adeno-associated virus, a lentivirus, and a herpes simplex virus-1. In some embodiments, the one of more viral vectors comprise a recombinant adeno-associated virus (AAV). In some embodiments, the recombinant AAV is of serotype 5 (AAV5). In some embodiments, the recombinant AAV is of serotype 6 (AAV6). In some embodiments, the one or more viral vectors comprise: a first viral vector comprising a first nucleic acid, in the one or more nucleic acids, encoding the Cas protein; and a second viral vector comprising a second nucleic acid, in the one or more nucleic acids, encoding the at least one guide RNA. In some embodiments, the one or more viral vectors comprise a viral vector comprising a single nucleic acid, wherein the single nucleic acid encodes the Cas9 protein and the at least one guide RNA.

### 1. Adeno-Associated Virus (AAV)

[0512] A viral vector system useful for delivery of nucleic acids is the adeno-associated virus (AAV). Adeno-associated virus is a naturally occurring defective virus that requires another virus, such as an adenovirus or a herpes virus, as a helper virus for efficient replication and a productive life cycle. For a review see Muzyczka et al., Curr. Topics in Micro. and Immunol. 158:97-129 (1992). It is also one of the few viruses that may integrate its DNA into non-dividing cells, and exhibits a high frequency of stable integration (see for example Flotte et al., Am. J. Respir. Cell. Mol. Biol. 7:349-356 (1992); Samulski et al., J. Virol. 63:3822-3828 (1989); and Mclaughlin et al., J. Virol. 62:1963-1973 (1989). Vectors containing as little as 300 base pairs of AAV can be packaged and can integrate. Space for exogenous DNA is limited to about 4.5 kb. An AAV vector such as that described in Tratschin et al., Mol. Cell. Biol. 5:3251-3260 (1985) can be used to introduce DNA into cells. A variety of nucleic acids have been introduced into different cell types using AAV vectors (see for example Hermonat et al., Proc. Natl. Acad. Sci. USA 81:6466-6470 (1984); Tratschin et al., Mol. Cell. Biol. 4:2072-2081 (1985); Wondisford et al., Mol. Endocrinol. 2:32-39 (1988); Tratschin et al., J. Virol. 51:611-619 (1984); and Flotte et al., J. Biol. Chem. 268:3781-3790 (1993). The identification of Staphylococcus aureus (SaCas9) and other smaller Cas9 enzymes that can be packaged into adeno-associated viral (AAV) vectors that are highly stable and effective in vivo, easily produced, approved by FDA, and tested in multiple clinical trials, paves new avenues for therapeutic gene editing.

[0513] According to particular embodiments, a CRISPR gene-editing system targeting a gene selected from IL1R1, IL1R2, IL1RAP, IL1RL1, TGFBR1, TGFBR2, IL6R, IL6ST, TNFRSF1A, TNFRSF1B, TNFRSF3, TNFRSF4, TNFRSF11A, and combinations thereof further comprise a recombinant AAV vector. In some embodiments, the CRISPR gene-editing system is encoded by a nucleic acid, wherein the nucleic acid is a recombinant AAV genome. In some embodiments, the AAV vector is selected from an AAV1 vector, an AAV2 vector, an AAV3 vector, an AAV4 vector, an AAV5 vector, an AAV6 vector, an AAV7 vector, an AAV8 vector, an AAV9 vector, and an AAV10 vector.

[0514] In some aspects, the AAV vector comprises a serotype selected from the group consisting of: AAV1, AAV1 (Y705+731F+T492V), AAV2 (Y444+500+730F+T491V), AAV3 (Y705+731F), AAV4, AAV5, AAV5 (Y436+693+719F), AAV6, AAV6 (VP3 variant Y705F/Y731F/T492V), AAV-7m8, AAV8, AAV8 (Y733F), AAV9, AAV9 (VP3 variant Y731F), AAV10 (Y733F), AAV-ShH10, and AAV-DJ/8. In some aspects, the AAV vector comprises a serotype selected from the group consisting of: AAV1, AAV5, AAV6, AAV6 (Y705F/Y731F/T492V), AAV8, AAV9, and AAV9 (Y731F).

[0515] In some embodiments, use of the CRISPR gene-editing system further comprising one or more LNPs to target a gene selected from IL1R1, IL1RAP, TGFBR1, TGFBR2, IL6R, IL6ST, TNFRSF1A, TNFRSF1B, TNFRSF3, TNFRSF4, TNFRSF11A, and combinations thereof is therapeutic.

[0516] In one aspect, use of the CRISPR gene-editing system further comprising one or more AAV vectors to target TGFBR1 and/or TGFBR2 is therapeutic. In some embodiments, use of the system treats one or more joint disease or illness or one or more back or spine conditions or disorders. In some embodiments, use of the system treats one or more musculoskeletal diseases, conditions, and illnesses, including, but not limited to, Loeys-Dietz Syndrome, osteoarthritis, Marfan syndrome, aortic aneurysm (e.g., familial thoracic 3 aortic aneurysm), craniofacial abnormalities, and combinations thereof. In other embodiments, use of the system treats neoplastic diseases, conditions, and illnesses, including, but not limited to, pancreatic cancer, multiple self-healing squamous epithelioma (Ferguson-Smith disease), gastrointestinal stromal tumors (GIST), hereditary nonpolyposis colorectal cancer (Lynch Syndrome), metastatic colorectal carcinoma, bone neoplasms, anaplastic carcinoma, spindle-cell carcinoma, lung neoplasms, brain neoplasms, and combinations thereof.

[0517] In some embodiments, the CRISPR gene-editing system further comprising one or more AAV vectors to target IL1R1 and/or IL1RAP is therapeutic. In some embodiments, use of the system treats one or more joint disease or illness or one or more back or spine conditions or disorders. In some embodiments, use of the system treats one or more musculoskeletal diseases, conditions, and illnesses, including, but not limited to, rheumatoid arthritis, gout, osteoarthritis, immune-mediated arthritis or polyarthritis, osteoporosis, intervertebral disc disease (IVDD), psoriatic arthritis, arthritis, polymyositis, acute or chronic inflammatory synovitis, proliferative synovitis, bone neoplasms, sarcoid myopathy, cortex bone disorders, idiopathic scoliosis, tendinopathy, myofibrillar myopathy, enthesis-related arthritis, ankylosing spondylitis, degenerative polyarthritis, arthopathy, osteitis deformans, prolapsed lumbar disc, polymyositis ossificans, idiopathic polymyositis, Luft Disease, adult-onset Still's Disease, osteoarthritis deformans, Bachet's Disease, and combinations thereof. In other embodiments, use of the system treats one or more neoplastic diseases, conditions, and illnesses, including, but not limited to, osteosarcoma, multiple myeloma, lymphoma (e.g., B-cell or cutaneous T-cell lymphoma), leukemia, thyroid carcinoma, glioma, renal cell carcinoma, chondrosarcoma, glioblastoma, melanoma, neuroblastoma, polycystic ovary syndrome, Kaposi sarcoma, squamous cell carcinoma, leiomyosarcoma, malignant peripheral nerve sheath tumor, Ewing's sarcoma, esophageal neoplasms, colon cancer, lung cancer, breast cancer, pancreatic cancer, stomach cancer, epithelial ovarian cancer, cholectoral cancer, liver cancer, skin cancer, prostate cancer, cervical cancer, ovarian cancer, bladder cancer, oral cavity cancer, and combinations thereof. In other embodiments, use of the system treats one or more inflammatory diseases, conditions, and illnesses, including, but not limited to, autoinflammatory disease (AID), cryopyrin-associated periodic syndrome (CAPS), systemic lupus erythematosus (SLE), inflammatory bowel disease (IBD) and combinations thereof. In some embodiments, use of the system treats one or more cardiac diseases, conditions, and illnesses, including, but not limited to, myocardial infarction, heart failure (e.g., refractory or acute decompensated heart failure), arrthymias, pericarditis (e.g., refractory idiopathic pericarditis), myocarditis, sepsis-induced cardiomyopathy, atherosclerosis, coronary artery disease and combinations thereof. In some embodiments, use of the system treats one or more neurological diseases, conditions, and illnesses, including, but not limited to, acute thrombotic stroke, epilepsy, multiple sclerosis, Alzheimer's Disease and combinations thereof. In some embodiments, use of the system treats one or more opthalmic diseases, conditions, and illnesses, including, but not limited to, uveitis, scleritis, Sjogren asthenia, dry eye and combinations thereof. In some embodiments, use of the system treats one or more diseases, conditions, and illnesses, including, but not limited to, chronic kidney disease, Type 2 diabetes, gastroesophageal reflux disease (GERD), non-HP-associated peptic ulcer disease, and pulmonary fibrosis.

### 2. Lentivirus

[0518] In some aspects, the viral vector is a lentivirus. In an aspect, the lentivirus is selected from the group consisting of: human immunodeficiency-1 (HIV-1), human immunodeficiency-2 (HIV-2), simian immunodeficiency virus (SIV), feline immunodeficiency virus (FIV), bovine immunodeficiency virus (BIV), Jembrana Disease Virus (JDV), equine infectious anemia virus (EIAV), and caprine arthritis encephalitis virus (CAEV).

[0519] Lentiviral transduction systems are known in the art and are described, e.g., in Levine, et al., Proc. Nat'l Acad. Sci. 2006, 103, 17372-77; Zufferey, et al., Nat. Biotechnol. 1997, 15, 871-75; Dull, et al., J. Virology 1998, 72, 8463-71, and U.S. Pat. No. 6,627,442, the disclosures of each of which are incorporated by reference herein.

[0520] In one aspect, use of the CRISPR gene-editing system further comprising one or more lentiviral vectors to target TGFBR1 and/or TGFBR2 is therapeutic. In some embodiments, use of the system treats one or more joint disease or illness, fibrosis and/or scarring, or one or more back or spine conditions or disorders. In some embodiments, use of the system treats one or more musculoskeletal diseases, conditions, and illnesses, including, but not limited to, Loeys-Dietz Syndrome, osteoarthritis, Marfan syndrome, aortic aneurysm (e.g., familial thoracic 3 aortic aneurysm), craniofacial abnormalities, and combinations thereof. In other embodiments, use of the system treats neoplastic diseases, conditions, and illnesses, including, but not limited to, pancreatic cancer, multiple self-healing squamous epithelioma (Ferguson-Smith disease), gastrointestinal stromal tumors (GIST), hereditary nonpolyposis colorectal cancer (Lynch Syndrome), metastatic colorectal carcinoma, bone neoplasms, anaplastic carcinoma, spindle-cell carcinoma, lung neoplasms, brain neoplasms, and combinations thereof.

[0521] In some embodiments, the CRISPR gene-editing system further comprising one or more lentiviral vectors to target IL1R1 and/or IL1RAP is therapeutic. In some embodiments, use of the system treats one or more joint disease or illness, fibrosis and/or scarring, or one or more back or spine conditions or disorders. In some embodiments, use of the system treats one or more musculoskeletal diseases, conditions, and illnesses, including, but not limited to, rheumatoid arthritis, gout, osteoarthritis, osteoporosis, intervertebral disc disease (IVDD), psoriatic arthritis, arthritis, polymyositis, proliferative synovitis, bone neoplasms, sarcoid myopathy, cortex bone disorders, idiopathic scoliosis, tendinopathy, myofibrillar myopathy, enthesis-related arthritis, ankylosing spondylitis, degenerative polyarthritis, arthropathy, osteitis deformans, prolapsed lumbar disc, polymyositis ossificans, idiopathic polymyositis, Luft Disease, adult-onset Still's Disease, osteoarthritis deformans, Bachet's Disease, and combinations thereof. In other embodiments, use of the system treats one or more neoplastic diseases, conditions, and illnesses, including, but not limited to, osteosarcoma, multiple myeloma, lymphoma (e.g., B-cell or cutaneous T-cell lymphoma), leukemia, thyroid carcinoma, glioma, renal cell carcinoma, chondrosarcoma, glioblastoma, melanoma, neuroblastoma, polycystic ovary syndrome, Kaposi sarcoma, squamous cell carcinoma, leiomyosarcoma, malignant peripheral nerve sheath tumor, Ewing's sarcoma, esophageal neoplasms, colon cancer, lung cancer, breast cancer, pancreatic cancer, stomach cancer, epithelial ovarian cancer, cholectoral cancer, liver cancer, skin cancer, prostate cancer, cervical cancer, ovarian cancer, bladder cancer, oral cavity cancer, and combinations thereof. In other embodiments, use of the system treats one or more inflammatory diseases, conditions, and illnesses, including, but not limited to, autoinflammatory disease (AID), cryopyrin-associated periodic syndrome (CAPS), systemic lupus erythematosus (SLE), inflammatory bowel disease (IBD) and combinations thereof. In some embodiments, use of the system treats one or more cardiac diseases, conditions, and illnesses, including, but not limited to, myocardial infarction, heart failure (e.g., refractory or acute decompensated heart failure), arrythmias, pericarditis (e.g., refractory idiopathic pericarditis), myocarditis, sepsis-induced cardiomyopathy, atherosclerosis, coronary artery disease and combinations thereof. In some embodiments, use of the system treats one or more neurological diseases, conditions, and illnesses, including, but not limited to, acute thrombotic stroke, epilepsy, multiple sclerosis, Alzheimer's Disease and combinations thereof. In some embodiments, use of the system treats one or more ophthalmic diseases, conditions, and illnesses, including, but not limited to, uveitis, scleritis, Sjogren asthenia, dry eye and combinations thereof. In some embodiments, use of the system treats one or more diseases, conditions, and illnesses, including, but not limited to, chronic kidney disease, Type 2 diabetes, gastroesophageal reflux disease (GERD), non-HP-associated peptic ulcer disease, and pulmonary fibrosis.

### B. Lipid Nanoparticles (LNP)

[0522] In some embodiments, a CRISPR gene-editing system is delivered by a nanoparticle. Without wishing to be bound by any particular theory, in certain embodiments, nucleic acids, when present in the nanoparticle, are resistant in aqueous solution to degradation with a nuclease. In other embodiments, proteins are protected from protease degradation. In some embodiments, proteins and nucleic acids encapsulated by nanoparticles are capable of penetrating the cellular plasma membrane.

[0523] Lipid nanoparticles comprising nucleic acids and their method of preparation is disclosed in at least WO2017/019935, WO2017/049074, WO2017/201346, WO2017/218704, WO2018/006052, WO2018/013525, WO2018/089540, WO2018/119115, WO2018/126084, WO2018/157009, WO2018/170336, WO2018/222890, WO2019/046809, WO2019/089828, WO2020/061284, WO2020/061317, WO2020/081938, WO2020/097511, WO2020/097520, WO2020/097540, WO2020/097548, WO2020/214946, WO2020/219941, WO2020/232276, WO2020/227615, WO2020/061295, WO2021/007278, WO2021/016430, WO2021/021988, EP Patent No. EP 2 972 360, US20200155691, US20200237671, U.S. Pat. Nos. 8,058,069, 8,492,359, 8,822,668, 9,364,435, 9,404,127, 9,504,651, 9,593,077, 9,738,593, 9,868,691, 9,868,692, 9,950,068, 10,138,213, 10,166,298, 10,221,127, 10,238,754, 10,266,485, 10,383,952, 10,730,924, 10,766,852, 11,079,379, 11,141,378 and 11,246,933, which are incorporated herein by reference in their entirety for all purposes.

### Lipid Nanoparticle Compositions

[0524] In some embodiments, the largest dimension of a nanoparticle composition is 1 micrometer or shorter (e.g., 1 micrometer, 900 nm, 800 nm, 700 nm, 600 nm, 500 nm, 400 nm, 300 nm, 200 nm, 175 nm, 150 nm, 125 nm, 100 nm, 75 nm, 50 nm, or shorter), e.g., when measured by dynamic light scattering (DLS), transmission electron microscopy, scanning electron microscopy, or another method. Nanoparticle compositions include, for example, lipid nanoparticles (LNPs), liposomes, lipid vesicles, and lipoplexes. In some embodiments, nanoparticle compositions are vesicles including one or more lipid bilayers. In certain embodiments, a nanoparticle composition includes two or more concentric bilayers separated by aqueous compartments. Lipid bilayers may be functionalized and/or crosslinked to one another. Lipid bilayers may include one or more ligands, proteins, or channels. In various embodiments, lipid nanoparticles described herein have a mean diameter of from about 30 nm to about 150 nm, from about 40 nm to about 150 nm, from about 50 nm to about 150 nm, from about 60 nm to about 130 nm, from about 70 nm to about 110 nm, from about 70 nm to about 100 nm, from about 80 nm to about 100 nm, from about 90 nm to about 100 nm, from about 70 nm to about 90 nm, from about 80 nm to about 90 nm, from about 70 nm to about 80 nm, or about 30 nm, 35 nm, 40 nm, 45 nm, 50 nm, 55 nm, 60 nm, 65 nm, 70 nm, 75 nm, 80 nm, 85 nm, 90 nm, 95 nm, 100 nm, 105 nm, 110 nm, 115 nm, 120 nm, 125 nm, 130 nm, 135 nm, 140 nm, 145 nm, or 150 nm, and are substantially non-toxic.

[0525] In certain embodiments, the lipid nanoparticles described herein comprise one or more components, including a lipid component, and (optionally) a structural component. The lipid component comprises lipids selected from ionizable and/or cationic lipids (i.e., lipids that may have a positive or partial positive charge at physiological pH), neutral lipids (e.g., phospholipids, or sphingolipids), and polymer-conjugated lipids (e.g., PEGylated lipids). In some embodiments, the lipid component comprises a single ionizable lipid. In other embodiments, the lipid component comprises 2, 3, 4, 5, 6, 7, 8, 9, 10, 15, or 20 ionizable lipids. In some embodiments, the lipid component comprises a single neutral lipid. In other embodiments, the lipid component comprises 2, 3, 4, 5, 6, 7, 8, 9, 10, 15, or 20 neutral lipids. In some embodiments, the lipid component comprises a single polymer-conjugated lipid. In other embodiments, the lipid component comprises 2, 3, 4, 5, 6, 7, 8, 9, 10, 15, or 20 polymer-conjugated lipids. In some embodiments, the structural component comprises a single structural lipid. In other embodiments, the structural component comprises 2, 3, 4, 5, 6, 7, 8, 9, 10, 15, or 20 structural lipids. In some embodiments, the lipid component comprises at least one cationic lipid, at least one neutral lipid, and at least one polymer-conjugated lipid. The present disclosure contemplates that the lipid component may comprise any combination of the foregoing constituents.

### Ionizable/Cationic Lipids

[0526] In some embodiments, the lipid component comprises an ionizable lipid. In some embodiments, the ionizable lipid is anionic. In other embodiments, the ionizable lipid is a cationic lipid. In some embodiments, the lipid component comprises cationic lipids including, but not limited to, a cationic lipid selected from the group consisting of 3-(didodecylamino)-N1,N1,4-tridodecyl-1-piperazineethanamine (KL10), N1-[2-(didodecylamino)ethyl]-N1,N4,N4-tridodecyl-1,4-piperazinediethanamine (KL22), 14,25-ditridecyl-15,18,21,24-tetraaza-octatriacontane (KL25), 1,2-dilinoleyloxy-N,N-dimethylaminopropane (DLin-DMA), 2,2-dilinoleyl-4-dimethylaminomethyl-[1,3]-dioxolane (DLin-K-DMA), heptatriaconta-6,9,28,31-tetraen-19-yl 4-(dimethylamino) butanoate (DLin-MC3-DMA), 2,2-dilinoleyl-4-(2-dimethylaminoethyl)-[1,3]-dioxolane (DLin-KC2-DMA), 1,2-dioleyloxy-N,N-dimethylaminopropane (DODMA), 2-({8-[(3.beta.)-cholest-5-en-3-yloxy]octyl}oxy)-N,N-dimethyl-3-[(9Z,12Z)--octadeca-9,12-dien-1-yloxy]propan-1-amine (Octyl-CLinDMA), (2R)-2-({8-[(3.beta.)-cholest-5-en-3-yloxy]octyl}oxy)-N,N-dimethyl-3-[(9Z-,12Z)-octadeca-9,12-dien-1-yloxy]propan-1-amine (Octyl-CLinDMA (2R)), (2S)-2-({8-[(3.beta.)-cholest-5-en-3-yloxy]octyl}oxy)-N,N-dimethyl-3-[(9Z-,12Z)-octadeca-9,12-dien-1-yloxy]propan-1-amine (Octyl-CLinDMA (2S)), a lipid including a cyclic amine group, and mixtures thereof.

[0527] Non-exhaustive and non-limiting examples of cationic lipids include:

[chemical structure]

[chemical structure]

[chemical structure]

[chemical structure]

[chemical structure]

### Neutral Lipids/Phospholipids

[0528] In some embodiments, the lipid component further comprises neutral lipids including, but not limited to, a phospholipid selected from the group consisting of 1,2-dilinoleoyl-sn-glycero-3-phosphocholine (DLPC), 1,2-dimyristoyl-sn-glycero-phosphocholine (DMPC), 1,2-dioleoyl-sn-glycero-3-phosphocholine (DOPC), 1,2-dipalmitoyl-sn-glycero-3-phosphocholine (DPPC), 1,2-distearoyl-sn-glycero-3-phosphocholine (DSPC), 1,2-diundecanoyl-sn-glycero-phosphocholine (DUPC), 1-palmitoyl-2-oleoyl-sn-glycero-3-phosphocholine (POPC), 1,2-di-O-octadecenyl-sn-glycero-3-phosphocholine (18:0 Diether PC), 1-oleoyl-2-cholesterylhemisuccinoyl-sn-glycero-3-phosphocholine (OChemsPC), 1-hexadecyl-sn-glycero-3-phosphocholine (C16 Lyso PC), 1,2-dilinolenoyl-sn-glycero-3-phosphocholine, 1,2-diarachidonoyl-sn-glycero-3-phosphocholine, 1,2-didocosahexaenoyl-sn-glycero-3-phosphocholine, 1,2-dioleoyl-sn-glycero-3-phosphoethanolamine (DOPE), 1,2-diphytanoyl-sn-glycero-3-phosphoethanolamine (ME 16.0 PE), 1,2-distearoyl-sn-glycero-3-phosphoethanolamine, 1,2-dilinoleoyl-sn-glycero-3-phosphoethanolamine, 1,2-dilinolenoyl-sn-glycero-3-phosphoethanolamine, 1,2-diarachidonoyl-sn-glycero-3-phosphoethanolamine, 1,2-didocosahexaenoyl-sn-glycero-3-phosphoethanolamine, 1,2-dioleoyl-sn-glycero-3-phospho-rac-(1-glycerol) sodium salt (DOPG), sphingomyelin (SM), and mixtures thereof.

### Polymer-Conjugated Lipids

[0529] In some embodiments, the lipid component further comprises polymer-conjugated lipids, including, but not limited to, a PEGylated lipid selected from the group consisting of PEG-modified phosphatidylethanolamines, PEG-modified phosphatidic acids, PEG-modified ceramides, PEG-modified dialkylamines, PEG-modified diacylglycerols, PEG-modified dialkylglycerols, and mixtures thereof. For example, a PEG lipid may be PEG-c-DOMG, PEG-DMG, PEG_{2000-c}-DMG, PEG-DLPE, PEG-DMPE, PEG-DPPC, PEG-DMA or a PEG-DSPE lipid.

### Non-Exhaustive and Non-Limiting Examples of PEG Lipids Include:

[chemical structure]

### Structural Lipids/Sterols

[0530] In some embodiments, the LNP further comprises a structural component. See generally Patel, S., et al. (2020). Nature Communications, 11 (1), 1-13. In some embodiments, the structural component comprises a sterol including, but not limited to, a sterol selected from the group consisting of cholesterol, fecosterol, stigmasterol, stigmastanol, sitosterol, β-sitosterol, lupeol, betulin, ursolic acid, oleanolic acid, campesterol, fucosterol, brassicasterol, ergosterol, 9,11-dehydroergosterol, tomatidine, tomatine, α-tocopherol, and mixtures thereof. In other embodiments, the structural lipid includes cholesterol and a corticosteroid (e.g., prednisolone, dexamethasone, prednisone, and hydrocortisone), or a combination thereof.

### Non-Exhaustive and Non-Limiting Examples of Structural Lipids Include:

[chemical structure]

### Formulations

[0531] Nanoparticle compositions may include a lipid component and one or more additional components, such as a therapeutic and/or prophylactic. A nanoparticle composition may be designed for one or more specific applications or targets. The elements of a nanoparticle composition may be selected based on a particular application or target, and/or based on the efficacy, toxicity, expense, ease of use, availability, or other feature of one or more elements. Similarly, the particular formulation of a nanoparticle composition may be selected for a particular application or target according to, for example, the efficacy and toxicity of particular combinations of elements.

[0532] The lipid component of a nanoparticle composition may include, for example, a cationic lipid, a phospholipid (such as an unsaturated lipid, e.g., DOPE or DSPC), a PEG lipid, and a structural lipid. The elements of the lipid component may be provided in specific fractions.

[0533] In some embodiments, the lipid component of a nanoparticle composition includes an ionizable lipid, a phospholipid, a PEG lipid, and a structural lipid. In certain embodiments, the lipid component of the nanoparticle composition includes about 30 mol % to about 60 mol % ionizable lipid, about 0 mol % to about 30 mol % phospholipid, about 0 mol % to about 10 mol % of PEG lipid, and about 17.5 mol % to about 50 mol % structural lipid, provided that the total mol % does not exceed 100%. In some embodiments, the lipid component of the nanoparticle composition includes about 35 mol % to about 55 mol % compound of ionizable lipid, about 5 mol % to about 25 mol % phospholipid, about 0 mol % to about 10 mol % of PEG lipid, and about 30 mol % to about 40 mol % structural lipid. In a particular embodiment, the lipid component includes about 50 mol % said compound, about 10 mol % phospholipid, about 38.5 mol % structural lipid, and about 1.5 mol % of PEG lipid. In another embodiment, the lipid component includes about 40 mol % said compound, about 20 mol % phospholipid, about 38.5 mol % structural lipid, and about 1.5 mol % of PEG lipid. In some embodiments, the phospholipid may be DOPE or DSPC. In other embodiments, the PEG lipid may be PEG-DMG and/or the structural lipid may be cholesterol.

[0534] In some embodiments, the ionizable lipids comprise between about 20 and about 60 mol % of the lipid component. In other embodiments, the ionizable lipids comprise between about 35 and about 55 mol % of the lipid component. In various embodiments, the ionizable lipids comprise about 20, 21, 22, 23, 24, 25, 26, 27, 28, 29, 30, 35, 40, 45, 50, 55, or 60 mol % of the lipid component.

[0535] In some embodiments, the neutral lipids comprise between about 0 and about 30 mol % of the lipid component. In other embodiments, the neutral lipids comprise between about 5 and about 25 mol % of the lipid component. In various embodiments, the neutral lipids comprise about 1, 2, 3, 4, 5, 6, 7, 8, 9, 10, 11, 12, 13, 14, 15, 16, 17, 18, 19, 20, 25, or 30 mol % of the lipid component.

[0536] In some embodiments, the polymer-conjugated lipids comprise between about 0 and about 15 mol % of the lipid component. In other embodiments, the polymer-conjugated lipids comprise between about 0.5 and about 10 mol % of the lipid component. In various embodiments, the polymer-conjugated lipids comprise about 0.5, 1, 1.5, 2, 2.5, 3, 3.5, 4, 4.5, 5, 5.5, 6, 6.5, 7, 7.5, 8, 8.5 9, 9.5, 10, or 15 mol % of the lipid component.

[0537] In some embodiments, the structural component comprises about 17.5 mol % to about 50 mol % of the lipid component. In other embodiments, the structural component comprises about 30 to about 40 mol % of the lipid component. In various embodiments, the structural component comprises about 17.5, 20, 22.5, 25, 27.5, 30, 31, 32, 33, 34, 35, 36, 37, 38, 39, 40, 41, 42, 43, 44, 45, 46, 47, 48, 49, or 50 mol % of the lipid component.

[0538] The structural component may alternatively be expressed as a ratio relative to the lipid component. In some embodiments, the structural component is in a ratio of about 1:1 with the lipid component (sterol: lipids). In other embodiments, the structural component is in a ratio of about 1:5 with the lipid component (sterol: lipids). In various embodiments, the structural component is in a ratio of about 1:1, 1:2, 1:3, 1:4, 1:5, 1:6, 1:7, 1:8, 1:9, 1:10, 1:15, 1:20, or 1:25 with the lipid component (sterol: lipids).

[0539] Nanoparticle compositions may be designed for one or more specific applications or targets. For example, a nanoparticle composition may be designed to deliver a therapeutic and/or prophylactic such as an RNA to a particular cell, tissue, organ, or system or group thereof in a mammal's body. Physiochemical properties of nanoparticle compositions may be altered in order to increase selectivity for particular bodily targets. For instance, particle sizes may be adjusted based on the fenestration sizes of different organs. The therapeutic and/or prophylactic included in a nanoparticle composition may also be selected based on the desired delivery target or tar-gets. For example, a therapeutic and/or prophylactic may be selected for a particular indication, condition, disease, or disorder and/or for delivery to a particular cell, tissue, organ, or system or group thereof (e.g., localized or specific delivery). In certain embodiments, a nanoparticle com-position may include an mRNA encoding a polypeptide of interest capable of being translated within a cell to produce the polypeptide of interest. Such a composition may be designed to be specifically delivered to a particular organ. In some embodiments, a composition may be de-signed to be specifically delivered to a mammalian joint.

[0540] The amount of a therapeutic and/or prophylactic in a nanoparticle composition may depend on the size, composition, desired target and/or application, or other properties of the nanoparticle composition as well as on the properties of the therapeutic and/or prophylactic. For example, the amount of an RNA useful in a nanoparticle composition may depend on the size, sequence, and other characteristics of the RNA. The relative amounts of a therapeutic and/or prophylactic and other elements (e.g., lipids) in a nanoparticle composition may also vary. In some embodiments, the wt/wt ratio of the lipid component to a therapeutic and/or prophylactic in a nanoparticle composition may be from about 5:1 to about 60:1, such as 5:1, 6:1, 7:1, 8:1, 9:1, 10:1, 11:1, 12:1, 13:1, 14:1, 15:1, 16:1, 17:1, 18:1, 19:1, 20:1, 25:1, 30:1, 35:1, 40:1, 45:1, 50:1, and 60:1. For example, the wt/wt ratio of the lipid component to a therapeutic and/or prophylactic may be from about 10:1 to about 40:1. In certain embodiments, the wt/wt ratio is about 20:1. The amount of a therapeutic and/or prophylactic in a nanoparticle composition may, for example, be measured using absorption spectroscopy (e.g., ultraviolet-visible spectroscopy).

[0541] In some embodiments, the therapeutic and/or prophylactic comprises a nucleic acid component. In some embodiments, the nucleic acid component comprises RNA including, but not limited to, RNA selected from the group consisting of messenger RNA (mRNA), CRISPR RNA (crRNA), tracrRNA, single-guide RNA (sgRNA), short interfering RNA (siRNA), antisense oligonucleotides (ASO), and mixtures thereof. In other embodiments, the nucleic acid component comprises DNA including, but not limited to, DNA selected from the group consisting of linear DNA, plasmid DNA, antisense oligonucleotide, and mixtures thereof.

[0542] In some embodiments, a nanoparticle composition includes one or more RNAs, and the one or more RNAs, lipids, and amounts thereof may be selected to provide a specific N:P ratio. The N:P ratio of the composition refers to the molar ratio of nitrogen atoms in one or more lipids to the number of phosphate groups in an RNA. In general, a lower N:P ratio is preferred. The one or more RNA, lipids, and amounts thereof may be selected to provide an N:P ratio from about 2:1 to about 30:1, such as 2:1, 3:1, 4:1, 5:1, 6:1, 7:1, 8:1, 9:1, 10:1, 12:1, 14:1, 16:1, 18:1, 20:1, 22:1, 24:1, 26:1, 28:1, or 30:1. In certain embodiments, the N:P ratio may be from about 2:1 to about 8:1. In other embodiments, the N:P ratio is from about 5:1 to about 8:1. For example, the N:P ratio may be about 5.0:1, about 5.5:1, about 5.67:1, about 6.0:1, about 6.5:1, or about 7.0:1. For example, the N:P ratio may be about 5.67:1.

[0543] In some embodiments, the nucleic acid component is comprised of a modified nucleic acid. For example, an RNA may be a modified RNA. That is, an RNA may include one or more nucleobases, nucleosides, nucleotides, or linkers that are non-naturally occurring. A “modified” species may also be referred to herein as an “altered” species. Species may be modified or altered chemically, structurally, or functionally. For example, a modified nucleobase species may include one or more substitutions that are not naturally occurring.

[0544] In certain embodiments, the present disclosure comprises methods for treating back or spine conditions or disorders. In other embodiments, the present disclosure comprises methods for treating discogenic disorders. In some embodiments, the present disclosure comprises methods for treating localized nociception, inflammation, or morphological changes associated with back or spine conditions or disorders in a subject in need thereof, the method comprising administering a therapeutically effective amount of a CRISPR-Cas composition encapsulated within or associated with a lipid nanoparticle (LNP), wherein the composition comprises one or more non-naturally occurring polynucleotides encoding a Cas9 protein and at least one sgRNA. In some embodiments, LNPs are administered intradiscally. In other embodiments, LNPs are administered epidurally. In some embodiments, LNPs are administered peridiscally. In some embodiments, LNPs are administered perivertebrally.

### Physical Properties

[0545] The characteristics of a nanoparticle composition may depend on the components thereof. For example, a nanoparticle composition including cholesterol as a structural lipid may have different characteristics than a nanoparticle composition that includes a different structural lipid. Similarly, the characteristics of a nanoparticle composition may depend on the absolute or relative amounts of its components. For instance, a nanoparticle composition including a higher molar fraction of a phospholipid may have different characteristics than a nanoparticle composition including a lower molar fraction of a phospholipid. Characteristics may also vary depending on the method and conditions of preparation of the nanoparticle composition.

[0546] Nanoparticle compositions may be characterized by a variety of methods. For example, microscopy (e.g., transmission electron microscopy or scanning electron microscopy) may be used to examine the morphology and size distribution of a nanoparticle composition. Dynamic light scattering or potentiometry (e.g., potentiometric titrations) may be used to measure zeta potentials. Dynamic light scattering may also be utilized to determine particle sizes. Instruments such as the Zetasizer Nano ZS (Malvern Instruments Ltd, Malvern, Worcestershire, UK) may also be used to measure multiple characteristics of a nanoparticle composition, such as particle size, polydispersity index, and zeta potential.

[0547] The mean size of a nanoparticle composition may be between 10 nm and 1 micrometer, e.g., measured by dynamic light scattering (DLS). For example, the mean size may be from about 40 nm to about 150 nm, such as about 40 nm, 45 nm, 50 nm, 55 nm, 60 nm, 65 nm, 70 nm, 75 nm, 80 nm, 85 nm, 90 nm, 95 nm, 100 nm, 105 nm, 110 nm, 115 nm, 120 nm, 125 nm, 130 nm, 135 nm, 140 nm, 145 nm, or 150 nm. In some embodiments, the mean size of a nanoparticle composition may be from about 50 nm to about 100 nm, from about 50 nm to about 90 nm, from about 50 nm to about 80 nm, from about 50 nm to about 70 nm, from about 50 nm to about 60 nm, from about 60 nm to about 100 nm, from about 60 nm to about 90 nm, from about 60 nm to about 80 nm, from about 60 nm to about 70 nm, from about 70 nm to about 100 nm, from about 70 nm to about 90 nm, from about 70 nm to about 80 nm, from about 80 nm to about 100 nm, from about 80 nm to about 90 nm, or from about 90 nm to about 100 nm. In certain embodiments, the mean size of a nanoparticle composition may be from about 70 nm to about 100 nm. In a particular embodiment, the mean size may be about 80 nm. In other embodiments, the mean size may be about 100 nm.

[0548] A nanoparticle composition may be relatively homogenous. A polydispersity index may be used to indicate the homogeneity of a nanoparticle composition, e.g., the particle size distribution of the nanoparticle compositions. A small (e.g., less than 0.3) polydispersity index generally indicates a narrow particle size distribution. A nanoparticle composition may have a polydispersity index from about 0 to about 0.25, such as 0.01, 0.02, 0.03, 0.04, 0.05, 0.06, 0.07, 0.08, 0.09, 0.10, 0.11, 0.12, 0.13, 0.14, 0.15, 0.16, 0.17, 0.18, 0.19, 0.20, 0.21, 0.22, 0.23, 0.24, or 0.25. In some embodiments, the polydispersity index of a nanoparticle composition may be from about 0.10 to about 0.20.

[0549] The zeta potential of a nanoparticle composition may be used to indicate the electrokinetic potential of the composition. For example, the zeta potential may describe the surface charge of a nanoparticle composition. Nanoparticle compositions with relatively low charges, positive or negative, are generally desirable, as more highly charged species may interact undesirably with cells, tissues, and other elements in the body. In some embodiments, the zeta potential of a nanoparticle composition may be from about −10 mV to about +20 mV, from about −10 mV to about +15 mV, from about −10 mV to about +10 mV, from about −10 mV to about +5 mV, from about −10 mV to about 0 mV, from about −10 mV to about −5 mV, from about −5 mV to about +20 mV, from about −5 mV to about +15 mV, from about −5 mV to about +10 mV, from about −5 mV to about +5 mV, from about −5 mV to about 0 mV, from about 0 mV to about +20 mV, from about 0 mV to about +15 mV, from about 0 mV to about +10 mV, from about 0 mV to about +5 mV, from about +5 mV to about +20 mV, from about +5 mV to about +15 mV, or from about +5 mV to about +10 mV.

[0550] The efficiency of encapsulation of a therapeutic and/or prophylactic describes the amount of therapeutic and/or prophylactic that is encapsulated or otherwise associated with a nanoparticle composition after preparation, relative to the initial amount provided. The encapsulation efficiency is desirably high (e.g., close to 100%). The encapsulation efficiency may be measured, for example, by comparing the amount of therapeutic and/or prophylactic in a solution containing the nanoparticle composition before and after breaking up the nanoparticle composition with one or more organic solvents or detergents. Fluorescence may be used to measure the amount of free therapeutic and/or prophylactic (e.g., RNA) in a solution. For the nanoparticle compositions described herein, the encapsulation efficiency of a therapeutic and/or prophylactic may be at least 50%, for example 50%, 55%, 60%, 65%, 70%, 75%, 80%, 85%, 9 0%, 91%, 92%, 93%, 94%, 95%, 96%, 97%, 98%, 99%, or 100%. In some embodiments, the encapsulation efficiency may be at least 80%. In certain embodiments, the encapsulation efficiency may be at least 90%.

[0551] A nanoparticle composition may optionally comprise one or more coatings. For example, a nanoparticle composition may be formulated in a capsule, film, or tablet having a coating. A capsule, film, or tablet including a composition described herein may have any useful size, tensile strength, hardness, or density.

[0552] Unless otherwise defined, all technical and scientific terms used herein have the same meaning as commonly understood by one of ordinary skill in the art to which this disclosure belongs. Although methods and materials similar or equivalent to those described herein may be used in the practice or testing of the present disclosure, suitable methods and materials are described below. All publications, patent applications, patents, and other references mentioned herein are incorporated by reference in their entirety. In addition, the materials, methods, and examples are illustrative only and not intended to be limiting.

[0553] In some embodiments, the CRISPR gene-editing system comprises one or more RNA-containing compositions. In some embodiments, the CRISPR gene-editing system further comprises one or more nanoparticles. In some embodiments, said one or more RNA-containing compositions comprises a guide RNA. In some embodiments, said one or more RNA-containing compositions comprises an mRNA. In some embodiments, said one or more RNA-containing compositions comprises an RNP (e.g., Cas9 and a guide RNA). In some embodiments, said one or more nanoparticles are lipid nanoparticles (LNP).

[0554] In some embodiments, the CRISPR gene-editing system comprises one or more LNPs collectively encapsulating (i) the RNA-guided nuclease or the nucleic acid encoding the RNA-guided nuclease and (ii) the at least one guide RNA or the nucleic acid encoding the at least one guide RNA. In some embodiments, the one or more LNPs comprises a first plurality of LNP encapsulating the RNA-guided nuclease or a nucleic acid encoding an RNA-guided nuclease and a second plurality of LNP encapsulating the at least one guide RNA or a nucleic acid encoding at least one guide RNA.

[0555] In some embodiments, the one or more LNP comprises a component selected from the group consisting of 3-(didodecylamino)-N1,N1,4-tridodecyl-1-piperazineethanamine (KL10), N1-[2-(didodecylamino)ethyl]-N1,N4,N4-tridodecyl-1,4-piperazinediethanamine (KL22), 14,25-ditridecyl-15,18,21,24-tetraaza-octatriacontane (KL25), 1,2-dilinoleyloxy-N,N-dimethylaminopropane (DLin-DMA), 2,2-dilinoleyl-4-dimethylaminomethyl-[1,3]-dioxolane (DLin-K-DMA), heptatriaconta-6,9,28,31-tetraen-19-yl 4-(dimethylamino) butanoate (DLin-MC3-DMA), 2,2-dilinoleyl-4-(2-dimethylaminoethyl)-[1,3]-dioxolane (DLin-KC2-DMA), 1,2-dioleyloxy-N,N-dimethylaminopropane (DODMA), 2-({8-[(3.beta.)-cholest-5-en-3-yloxy]octyl}oxy)-N,N-dimethyl-3-[(9Z,12Z)--octadeca-9,12-dien-1-yloxy]propan-1-amine (Octyl-CLinDMA), (2R)-2-({8-[(3.beta.)-cholest-5-en-3-yloxy]octyl}oxy)-N,N-dimethyl-3-[(9Z-,12Z)-octadeca-9,12-dien-1-yloxy]propan-1-amine (Octyl-CLinDMA (2R)), (2S)-2-({8-[(3.beta.)-cholest-5-en-3-yloxy]octyl}oxy)-N,N-dimethyl-3-[(9Z-,12Z)-octadeca-9,12-dien-1-yloxy]propan-1-amine (Octyl-CLinDMA (2S)), a lipid including a cyclic amine group, and a mixture thereof.

[0556] In some embodiments, the one or more LNP comprises a component selected from the group consisting of 1,2-dilinoleoyl-sn-glycero-3-phosphocholine (DLPC), 1,2-dimyristoyl-sn-glycero-phosphocholine (DMPC), 1,2-dioleoyl-sn-glycero-3-phosphocholine (DOPC), 1,2-dipalmitoyl-sn-glycero-3-phosphocholine (DPPC), 1,2-distearoyl-sn-glycero-3-phosphocholine (DSPC), 1,2-diundecanoyl-sn-glycero-phosphocholine (DUPC), 1-palmitoyl-2-oleoyl-sn-glycero-3-phosphocholine (POPC), 1,2-di-O-octadecenyl-sn-glycero-3-phosphocholine (18:0 Diether PC), 1-oleoyl-2-cholesterylhemisuccinoyl-sn-glycero-3-phosphocholine (OChemsPC), 1-hexadecyl-sn-glycero-3-phosphocholine (C16 Lyso PC), 1,2-dilinolenoyl-sn-glycero-3-phosphocholine, 1,2-diarachidonoyl-sn-glycero-3-phosphocholine, 1,2-didocosahexaenoyl-sn-glycero-3-phosphocholine, 1,2-dioleoyl-sn-glycero-3-phosphoethanolamine (DOPE), 1,2-diphytanoyl-sn-glycero-3-phosphoethanolamine (ME 16.0 PE), 1,2-distearoyl-sn-glycero-3-phosphoethanolamine, 1,2-dilinoleoyl-sn-glycero-3-phosphoethanolamine, 1,2-dilinolenoyl-sn-glycero-3-phosphoethanolamine, 1,2-diarachidonoyl-sn-glycero-3-phosphoethanolamine, 1,2-didocosahexaenoyl-sn-glycero-3-phosphoethanolamine, 1,2-dioleoyl-sn-glycero-3-phospho-rac-(1-glycerol) sodium salt (DOPG), sphingomyelin (SM), and a mixture thereof.

[0557] In some embodiments, the one or more LNP comprises a component selected from the group consisting of PEG-modified phosphatidylethanolamines, PEG-modified phosphatidic acids, PEG-modified ceramides, PEG-modified dialkylamines, PEG-modified diacylglycerols, PEG-modified dialkylglycerols, and mixtures thereof. For example, a PEG lipid may be PEG-c-DOMG, PEG-DMG, PEG-DLPE, PEG-DMPE, PEG-DPPC, PEG-DMA, a PEG-DSPE lipid, and a mixture thereof.

[0558] In some embodiments, the one or more LNP comprises a component selected from the group consisting of a cholesterol, fecosterol, stigmasterol, stigmastanol, sitosterol, β-sitosterol, lupeol, betulin, ursolic acid, oleanolic acid, campesterol, fucosterol, brassicasterol, ergosterol, 9,11-dehydroergosterol, tomatidine, tomatine, α-tocopherol, and a mixture thereof.

[0559] In some embodiments, use of the CRISPR gene-editing system further comprising one or more LNPs to target a gene selected from IL1R1, IL1RAP, TGFBR1, TGFBR2, IL6R, IL6ST, TNFRSF1A, TNFRSF1B, TNFRSF3, TNFRSF4, TNFRSF11A, and combinations thereof is therapeutic.

[0560] In some aspect, use of the CRISPR gene-editing system further comprising one or more LNPs to target TGFBR1 and/or TGFBR2 is therapeutic. In some embodiments, use of the system treats one or more joint disease or illness or one or more back or spine conditions or disorders. In some embodiments, use of the system treats one or more musculoskeletal diseases, conditions, and illnesses, including, but not limited to, Loeys-Dietz Syndrome, osteoarthritis, Marfan syndrome, aortic aneurysm (e.g., familial thoracic 3 aortic aneurysm), craniofacial abnormalities, and combinations thereof. In other embodiments, use of the system treats neoplastic diseases, conditions, and illnesses, including, but not limited to, pancreatic cancer, multiple self-healing squamous epithelioma (Ferguson-Smith disease), gastrointestinal stromal tumors (GIST), hereditary nonpolyposis colorectal cancer (Lynch Syndrome), metastatic colorectal carcinoma, bone neoplasms, anaplastic carcinoma, spindle-cell carcinoma, lung neoplasms, brain neoplasms, and combinations thereof.

[0561] In some embodiments, the CRISPR gene-editing system further comprising one or more LNPs to target IL1R1 and/or IL1RAP is therapeutic. In some embodiments, use of the system treats one or more joint disease or illness or one or more back or spine conditions or disorders. In some embodiments, use of the system treats one or more musculoskeletal diseases, conditions, and illnesses, including, but not limited to, rheumatoid arthritis, gout, osteoarthritis, osteoporosis, intervertebral disc disease (IVDD), psoriatic arthritis, arthritis, polymyositis, proliferative synovitis, bone neoplasms, sarcoid myopathy, cortex bone disorders, idiopathic scoliosis, tendinopathy, myofibrillar myopathy, enthesis-related arthritis, ankylosing spondylitis, degenerative polyarthritis, arthropathy, osteitis deformans, prolapsed lumbar disc, polymyositis ossificans, idiopathic polymyositis, Luft Disease, adult-onset Still's Disease, osteoarthritis deformans, Bachet's Disease, and combinations thereof. In other embodiments, use of the system treats one or more neoplastic diseases, conditions, and illnesses, including, but not limited to, osteosarcoma, multiple myeloma, lymphoma (e.g., B-cell or cutaneous T-cell lymphoma), leukemia, thyroid carcinoma, glioma, renal cell carcinoma, chondrosarcoma, glioblastoma, melanoma, neuroblastoma, polycystic ovary syndrome, Kaposi sarcoma, squamous cell carcinoma, leiomyosarcoma, malignant peripheral nerve sheath tumor, Ewing's sarcoma, esophageal neoplasms, colon cancer, lung cancer, breast cancer, pancreatic cancer, stomach cancer, epithelial ovarian cancer, cholectoral cancer, liver cancer, skin cancer, prostate cancer, cervical cancer, ovarian cancer, bladder cancer, oral cavity cancer, and combinations thereof. In other embodiments, use of the system treats one or more inflammatory diseases, conditions, and illnesses, including, but not limited to, autoinflammatory disease (AID), cryopyrin-associated periodic syndrome (CAPS), systemic lupus erythematosus (SLE), inflammatory bowel disease (IBD) and combinations thereof. In some embodiments, use of the system treats one or more cardiac diseases, conditions, and illnesses, including, but not limited to, myocardial infarction, heart failure (e.g., refractory or acute decompensated heart failure), arrythmias, pericarditis (e.g., refractory idiopathic pericarditis), myocarditis, sepsis-induced cardiomyopathy, atherosclerosis, coronary artery disease and combinations thereof. In some embodiments, use of the system treats one or more neurological diseases, conditions, and illnesses, including, but not limited to, acute thrombotic stroke, epilepsy, multiple sclerosis, Alzheimer's Disease and combinations thereof. In some embodiments, use of the system treats one or more ophthalmic diseases, conditions, and illnesses, including, but not limited to, uveitis, scleritis, Sjogren asthenia, dry eye and combinations thereof. In some embodiments, use of the system treats one or more diseases, conditions, and illnesses, including, but not limited to, chronic kidney disease, Type 2 diabetes, gastroesophageal reflux disease (GERD), non-HP-associated peptic ulcer disease, and pulmonary fibrosis.

### C. Virus-Like Particles

[0562] In one aspect, the present disclosure encompasses means for delivering a CRISPR gene-editing system to a mammalian cell via a virus-like particle (VLP). In some embodiments, a CRISPR gene-editing system is delivered by a VLP. Without wishing to be bound by any particular theory, in certain embodiments, nucleic acids, when present in the particle, are resistant in aqueous solution to degradation with a nuclease. In other embodiments, proteins are protected from protease degradation while present in the particle. In some embodiments, proteins and nucleic acids encapsulated by VLPs are capable of penetrating the cellular plasma membrane.

[0563] In some embodiments, the CRISPR gene-editing system comprises one or more RNA-containing compositions. In some embodiments, the CRISPR gene-editing system further comprises one or more VLPs. In some embodiments, said one or more RNA-containing compositions comprises a guide RNA. In some embodiments, said one or more RNA-containing compositions comprises an mRNA. In some embodiments, said one or more RNA-containing compositions comprises an RNP (e.g., Cas9 and a guide RNA).

[0564] In some embodiments, the CRISPR gene-editing system comprises one or more virus-like particles collectively encapsulating (i) the RNA-guided nuclease or the nucleic acid encoding the RNA-guided nuclease and (ii) the at least one guide RNA or the nucleic acid encoding the at least one guide RNA. In some embodiments, the one or more virus-like particles comprises a first plurality of virus-like particles encapsulating the RNA-guided nuclease or a nucleic acid encoding an RNA-guided nuclease and a second plurality of virus-like particles encapsulating the at least one guide RNA or a nucleic acid encoding at least one guide RNA.

[0565] In some embodiments, use of the CRISPR gene-editing system further comprising one or more LNPs to target a gene selected from IL1R1, IL1RAP, TGFBR1, TGFBR2, IL6R, IL6ST, TNFRSF1A, TNFRSF1B, TNFRSF3, TNFRSF4, TNFRSF11A, and combinations thereof is therapeutic.

[0566] In one aspect, use of the CRISPR gene-editing system further comprising one or more VLPs to target TGFBR1 and/or TGFBR2 is therapeutic. In some embodiments, use of the system treats one or more joint disease or illness or one or more back or spine conditions or disorders. In some embodiments, use of the system treats one or more musculoskeletal diseases, conditions, and illnesses, including, but not limited to, Loeys-Dietz Syndrome, osteoarthritis, Marfan syndrome, aortic aneurysm (e.g., familial thoracic 3 aortic aneurysm), craniofacial abnormalities, and combinations thereof. In other embodiments, use of the system treats neoplastic diseases, conditions, and illnesses, including, but not limited to, pancreatic cancer, multiple self-healing squamous epithelioma (Ferguson-Smith disease), gastrointestinal stromal tumors (GIST), hereditary nonpolyposis colorectal cancer (Lynch Syndrome), metastatic colorectal carcinoma, bone neoplasms, anaplastic carcinoma, spindle-cell carcinoma, lung neoplasms, brain neoplasms, and combinations thereof.

[0567] In some embodiments, the CRISPR gene-editing system further comprising one or more VLPs to target IL1R1 and/or IL1RAP is therapeutic. In some embodiments, use of the system treats one or more joint disease or illness or one or more back or spine conditions or disorders. In some embodiments, use of the system treats one or more musculoskeletal diseases, conditions, and illnesses, including, but not limited to, rheumatoid arthritis, gout, osteoarthritis, osteoporosis, intervertebral disc disease (IVDD), psoriatic arthritis, arthritis, polymyositis, proliferative synovitis, bone neoplasms, sarcoid myopathy, cortex bone disorders, idiopathic scoliosis, tendinopathy, myofibrillar myopathy, enthesis-related arthritis, ankylosing spondylitis, degenerative polyarthritis, arthropathy, osteitis deformans, prolapsed lumbar disc, polymyositis ossificans, idiopathic polymyositis, Luft Disease, adult-onset Still's Disease, osteoarthritis deformans, Bachet's Disease, and combinations thereof. In other embodiments, use of the system treats one or more neoplastic diseases, conditions, and illnesses, including, but not limited to, osteosarcoma, multiple myeloma, lymphoma (e.g., B-cell or cutaneous T-cell lymphoma), leukemia, thyroid carcinoma, glioma, renal cell carcinoma, chondrosarcoma, glioblastoma, melanoma, neuroblastoma, polycystic ovary syndrome, Kaposi sarcoma, squamous cell carcinoma, leiomyosarcoma, malignant peripheral nerve sheath tumor, Ewing's sarcoma, esophageal neoplasms, colon cancer, lung cancer, breast cancer, pancreatic cancer, stomach cancer, epithelial ovarian cancer, cholectoral cancer, liver cancer, skin cancer, prostate cancer, cervical cancer, ovarian cancer, bladder cancer, oral cavity cancer, and combinations thereof. In other embodiments, use of the system treats one or more inflammatory diseases, conditions, and illnesses, including, but not limited to, autoinflammatory disease (AID), cryopyrin-associated periodic syndrome (CAPS), systemic lupus erythematosus (SLE), inflammatory bowel disease (IBD) and combinations thereof. In some embodiments, use of the system treats one or more cardiac diseases, conditions, and illnesses, including, but not limited to, myocardial infarction, heart failure (e.g., refractory or acute decompensated heart failure), arrythmias, pericarditis (e.g., refractory idiopathic pericarditis), myocarditis, sepsis-induced cardiomyopathy, atherosclerosis, coronary artery disease and combinations thereof. In some embodiments, use of the system treats one or more neurological diseases, conditions, and illnesses, including, but not limited to, acute thrombotic stroke, epilepsy, multiple sclerosis, Alzheimer's Disease and combinations thereof. In some embodiments, use of the system treats one or more ophthalmic diseases, conditions, and illnesses, including, but not limited to, uveitis, scleritis, Sjogren asthenia, dry eye and combinations thereof. In some embodiments, use of the system treats one or more diseases, conditions, and illnesses, including, but not limited to, chronic kidney disease, Type 2 diabetes, gastroesophageal reflux disease (GERD), non-HP-associated peptic ulcer disease, and pulmonary fibrosis.

### D. Miscellaneous Modes of Delivery

### 1. Liposomes

[0568] In some embodiments, nucleic acids encoding a CRISPR gene-editing system targeting a gene selected from IL1R1, IL1R2, IL1RAP, IL1RL1, TGFBR1, TGFBR2, IL6R, IL6ST, TNFRSF1A, TNFRSF1B, TNFRSF3, TNFRSF4, TNFRSF11A, and combinations thereof (e.g., Cas9 or gRNA) are entrapped in liposomes bearing positive charges on their surface (e.g., lipofectins), which can be tagged with antibodies against cell surface antigens of the target cells. These delivery vehicles can also be used to deliver Cas9 protein/gRNA complexes.

[0569] In some embodiments, the CRISPR gene-editing system comprises one or more RNA-containing compositions. In some embodiments, the CRISPR gene-editing system further comprises one or more liposomes. In some embodiments, said one or more RNA-containing compositions comprises a guide RNA. In some embodiments, said one or more RNA-containing compositions comprises an mRNA. In some embodiments, said one or more RNA-containing compositions comprises an RNP (e.g., Cas9 and a guide RNA).

[0570] In some embodiments, wherein the composition comprises one or more liposomes collectively encapsulating (i) the RNA-guided nuclease or the nucleic acid encoding the RNA-guided nuclease and (ii) the at least one guide RNA or the nucleic acid encoding the at least one guide RNA. In some embodiments, the one or more liposomes comprises a first plurality of liposomes encapsulating the RNA-guided nuclease or a nucleic acid encoding an RNA-guided nuclease and a second plurality of liposomes encapsulating the at least one guide RNA or a nucleic acid encoding at least one guide RNA.

[0571] In some embodiments, use of the CRISPR gene-editing system further comprising one or more LNPs to target a gene selected from IL1R1, IL1RAP, TGFBR1, TGFBR2, IL6R, IL6ST, TNFRSF1A, TNFRSF1B, TNFRSF3, TNFRSF4, TNFRSF11A, and combinations thereof is therapeutic.

[0572] In one aspect, use of the CRISPR gene-editing system further comprising one or more liposomes to target TGFBR1 and/or TGFBR2 is therapeutic. In some embodiments, use of the system treats one or more joint disease or illness or one or more back or spine conditions or disorders. In some embodiments, use of the system treats one or more musculoskeletal diseases, conditions, and illnesses, including, but not limited to, Loeys-Dietz Syndrome, osteoarthritis, Marfan syndrome, aortic aneurysm (e.g., familial thoracic 3 aortic aneurysm), craniofacial abnormalities, and combinations thereof. In other embodiments, use of the system treats neoplastic diseases, conditions, and illnesses, including, but not limited to, pancreatic cancer, multiple self-healing squamous epithelioma (Ferguson-Smith disease), gastrointestinal stromal tumors (GIST), hereditary nonpolyposis colorectal cancer (Lynch Syndrome), metastatic colorectal carcinoma, bone neoplasms, anaplastic carcinoma, spindle-cell carcinoma, lung neoplasms, brain neoplasms, and combinations thereof.

[0573] In some embodiments, the CRISPR gene-editing system further comprising one or more liposomes to target IL1R1 and/or IL1RAP is therapeutic. In some embodiments, use of the system treats one or more joint disease or illness or one or more back or spine conditions or disorders. In some embodiments, use of the system treats one or more musculoskeletal diseases, conditions, and illnesses, including, but not limited to, rheumatoid arthritis, gout, osteoarthritis, osteoporosis, intervertebral disc disease (IVDD), psoriatic arthritis, arthritis, polymyositis, proliferative synovitis, bone neoplasms, sarcoid myopathy, cortex bone disorders, idiopathic scoliosis, tendinopathy, myofibrillar myopathy, enthesis-related arthritis, ankylosing spondylitis, degenerative polyarthritis, arthropathy, osteitis deformans, prolapsed lumbar disc, polymyositis ossificans, idiopathic polymyositis, Luft Disease, adult-onset Still's Disease, osteoarthritis deformans, Bachet's Disease, and combinations thereof. In other embodiments, use of the system treats one or more neoplastic diseases, conditions, and illnesses, including, but not limited to, osteosarcoma, multiple myeloma, lymphoma (e.g., B-cell or cutaneous T-cell lymphoma), leukemia, thyroid carcinoma, glioma, renal cell carcinoma, chondrosarcoma, glioblastoma, melanoma, neuroblastoma, polycystic ovary syndrome, Kaposi sarcoma, squamous cell carcinoma, leiomyosarcoma, malignant peripheral nerve sheath tumor, Ewing's sarcoma, esophageal neoplasms, colon cancer, lung cancer, breast cancer, pancreatic cancer, stomach cancer, epithelial ovarian cancer, cholectoral cancer, liver cancer, skin cancer, prostate cancer, cervical cancer, ovarian cancer, bladder cancer, oral cavity cancer, and combinations thereof. In other embodiments, use of the system treats one or more inflammatory diseases, conditions, and illnesses, including, but not limited to, autoinflammatory disease (AID), cryopyrin-associated periodic syndrome (CAPS), systemic lupus erythematosus (SLE), inflammatory bowel disease (IBD) and combinations thereof. In some embodiments, use of the system treats one or more cardiac diseases, conditions, and illnesses, including, but not limited to, myocardial infarction, heart failure (e.g., refractory or acute decompensated heart failure), arrythmias, pericarditis (e.g., refractory idiopathic pericarditis), myocarditis, sepsis-induced cardiomyopathy, atherosclerosis, coronary artery disease and combinations thereof. In some embodiments, use of the system treats one or more neurological diseases, conditions, and illnesses, including, but not limited to, acute thrombotic stroke, epilepsy, multiple sclerosis, Alzheimer's Disease and combinations thereof. In some embodiments, use of the system treats one or more ophthalmic diseases, conditions, and illnesses, including, but not limited to, uveitis, scleritis, Sjogren asthenia, dry eye and combinations thereof. In some embodiments, use of the system treats one or more diseases, conditions, and illnesses, including, but not limited to, chronic kidney disease, Type 2 diabetes, gastroesophageal reflux disease (GERD), non-HP-associated peptic ulcer disease, and pulmonary fibrosis.

### 2. Lipid Nanocrystals (LNC)

[0574] In one aspect, the In one aspect, the present disclosure encompasses means for delivering a CRISPR gene-editing system to a mammalian cell via a lipid nanocrystal (LNC). In some embodiments, a CRISPR gene-editing system is delivered by a LNC. Without wishing to be bound by any particular theory, in certain embodiments, nucleic acids, when present in the nanocrystal, are resistant in aqueous solution to degradation with a nuclease. In other embodiments, proteins are protected from protease degradation while present in the nanocrystal. In some embodiments, proteins and nucleic acids encapsulated by nanocrystal are capable of penetrating the cellular plasma membrane.

[0575] In some embodiments, the CRISPR gene-editing system comprises one or more RNA-containing compositions. In some embodiments, the CRISPR gene-editing system further comprises one or more nanocrystals. In some embodiments, said one or more RNA-containing compositions comprises a guide RNA. In some embodiments, said one or more RNA-containing compositions comprises an mRNA. In some embodiments, said one or more RNA-containing compositions comprises an RNP (e.g., Cas9 and a guide RNA). In some embodiments, said one or more nanocrystals are lipid nanocrystals (LNC).

[0576] In some embodiments, the CRISPR gene-editing system comprises one or more LNCs collectively encapsulating (i) the RNA-guided nuclease or the nucleic acid encoding the RNA-guided nuclease and (ii) the at least one guide RNA or the nucleic acid encoding the at least one guide RNA. In some embodiments, the one or more LNCs comprises a first plurality of LNC encapsulating the RNA-guided nuclease or a nucleic acid encoding an RNA-guided nuclease and a second plurality of LNC encapsulating the at least one guide RNA or a nucleic acid encoding at least one guide RNA.

[0577] In some embodiments, use of the CRISPR gene-editing system further comprising one or more LNPs to target a gene selected from IL1R1, IL1RAP, TGFBR1, TGFBR2, IL6R, IL6ST, TNFRSF1A, TNFRSF1B, TNFRSF3, TNFRSF4, TNFRSF11A, and combinations thereof is therapeutic.

[0578] In one aspect, use of the CRISPR gene-editing system further comprising one or more LNCs to target TGFBR1 and/or TGFBR2 is therapeutic. In some embodiments, use of the system treats one or more joint disease or illness or one or more back or spine conditions or disorders. In some embodiments, use of the system treats one or more musculoskeletal diseases, conditions, and illnesses, including, but not limited to, Loeys-Dietz Syndrome, osteoarthritis, Marfan syndrome, aortic aneurysm (e.g., familial thoracic 3 aortic aneurysm), craniofacial abnormalities, and combinations thereof. In other embodiments, use of the system treats neoplastic diseases, conditions, and illnesses, including, but not limited to, pancreatic cancer, multiple self-healing squamous epithelioma (Ferguson-Smith disease), gastrointestinal stromal tumors (GIST), hereditary nonpolyposis colorectal cancer (Lynch Syndrome), metastatic colorectal carcinoma, bone neoplasms, anaplastic carcinoma, spindle-cell carcinoma, lung neoplasms, brain neoplasms, and combinations thereof.

[0579] In some embodiments, the CRISPR gene-editing system further comprising one or more LNCs to target IL1R1 and/or IL1RAP is therapeutic. In some embodiments, use of the system treats one or more joint disease or illness or one or more back or spine conditions or disorders. In some embodiments, use of the system treats one or more musculoskeletal diseases, conditions, and illnesses, including, but not limited to, rheumatoid arthritis, gout, osteoarthritis, osteoporosis, intervertebral disc disease (IVDD), psoriatic arthritis, arthritis, polymyositis, proliferative synovitis, bone neoplasms, sarcoid myopathy, cortex bone disorders, idiopathic scoliosis, tendinopathy, myofibrillar myopathy, enthesis-related arthritis, ankylosing spondylitis, degenerative polyarthritis, arthropathy, osteitis deformans, prolapsed lumbar disc, polymyositis ossificans, idiopathic polymyositis, Luft Disease, adult-onset Still's Disease, osteoarthritis deformans, Bachet's Disease, and combinations thereof. In other embodiments, use of the system treats one or more neoplastic diseases, conditions, and illnesses, including, but not limited to, osteosarcoma, multiple myeloma, lymphoma (e.g., B-cell or cutaneous T-cell lymphoma), leukemia, thyroid carcinoma, glioma, renal cell carcinoma, chondrosarcoma, glioblastoma, melanoma, neuroblastoma, polycystic ovary syndrome, Kaposi sarcoma, squamous cell carcinoma, leiomyosarcoma, malignant peripheral nerve sheath tumor, Ewing's sarcoma, esophageal neoplasms, colon cancer, lung cancer, breast cancer, pancreatic cancer, stomach cancer, epithelial ovarian cancer, cholectoral cancer, liver cancer, skin cancer, prostate cancer, cervical cancer, ovarian cancer, bladder cancer, oral cavity cancer, and combinations thereof. In other embodiments, use of the system treats one or more inflammatory diseases, conditions, and illnesses, including, but not limited to, autoinflammatory disease (AID), cryopyrin-associated periodic syndrome (CAPS), systemic lupus erythematosus (SLE), inflammatory bowel disease (IBD) and combinations thereof. In some embodiments, use of the system treats one or more cardiac diseases, conditions, and illnesses, including, but not limited to, myocardial infarction, heart failure (e.g., refractory or acute decompensated heart failure), arrythmias, pericarditis (e.g., refractory idiopathic pericarditis), myocarditis, sepsis-induced cardiomyopathy, atherosclerosis, coronary artery disease and combinations thereof. In some embodiments, use of the system treats one or more neurological diseases, conditions, and illnesses, including, but not limited to, acute thrombotic stroke, epilepsy, multiple sclerosis, Alzheimer's Disease and combinations thereof. In some embodiments, use of the system treats one or more ophthalmic diseases, conditions, and illnesses, including, but not limited to, uveitis, scleritis, Sjogren asthenia, dry eye and combinations thereof. In some embodiments, use of the system treats one or more diseases, conditions, and illnesses, including, but not limited to, chronic kidney disease, Type 2 diabetes, gastroesophageal reflux disease (GERD), non-HP-associated peptic ulcer disease, and pulmonary fibrosis.

### VII. Pharmaceutical Compositions

[0580] In one aspect, the present disclosure encompasses pharmaceutical compositions comprising a CRISPR gene-editing system for treatment of a mammal in need thereof. In some embodiments, the CRISPR gene-editing system targets a gene selected from IL1R1, IL1R2, IL1RAP, IL1RL1, TGFBR1, TGFBR2, IL6R, IL6ST, TNFRSF1A, TNFRSF1B, TNFRSF3, TNFRSF4, TNFRSF11A, and combinations thereof. In some embodiments, the mammal is selected from a human, a dog, a horse, and a cat.

### A. IL1R1

[0581] In some embodiments, the pharmaceutical composition comprising a CRISPR gene-editing system targets IL1R1. In some embodiments, the CRISPR gene-editing system targeting IL1R1 is delivered to a mammalian cell via viral vector. In some embodiments, the CRISPR gene-editing system targeting IL1R1 is delivered to a mammalian cell via an AAV vector. In some embodiments, the CRISPR gene-editing system targeting IL1R1 is delivered to a mammalian cell via a lentiviral vector. In some embodiments, the CRISPR gene-editing system targeting IL1R1 is delivered to a mammalian cell via a lipid nanoparticle. In some embodiments, the CRISPR gene-editing system targeting IL1R1 is delivered to a mammalian cell via a virus-like particle. In some embodiments, the CRISPR gene-editing system targeting IL1R1 is delivered to a mammalian cell via a liposome. In some embodiments, the CRISPR gene-editing system targeting IL1R1 is delivered to a mammalian cell via a lipid nanocrystal.

[0582] In various embodiments, the pharmaceutical composition comprising a CRISPR gene-editing system that targets the IL1R1 gene is used in a method of treating a mammal in need thereof. In some embodiments, the method treats one or more joint disease or illness or one or more back or spine conditions or disorders. In some embodiments, the method treats one or more musculoskeletal diseases, conditions, and illnesses, including, but not limited to, rheumatoid arthritis, gout, osteoarthritis, osteoporosis, intervertebral disc disease (IVDD), psoriatic arthritis, arthritis, polymyositis, proliferative synovitis, bone neoplasms, sarcoid myopathy, cortex bone disorders, idiopathic scoliosis, tendinopathy, myofibrillar myopathy, enthesis-related arthritis, ankylosing spondylitis, degenerative polyarthritis, arthropathy, osteitis deformans, prolapsed lumbar disc, polymyositis ossificans, idiopathic polymyositis, Luft Disease, adult-onset Still's Disease, osteoarthritis deformans, Bachet's Disease, and combinations thereof. In other embodiments, use of the system treats one or more neoplastic diseases, conditions, and illnesses, including, but not limited to, osteosarcoma, multiple myeloma, lymphoma (e.g., B-cell or cutaneous T-cell lymphoma), leukemia, thyroid carcinoma, glioma, renal cell carcinoma, chondrosarcoma, glioblastoma, melanoma, neuroblastoma, polycystic ovary syndrome, Kaposi sarcoma, squamous cell carcinoma, leiomyosarcoma, malignant peripheral nerve sheath tumor, Ewing's sarcoma, esophageal neoplasms, colon cancer, lung cancer, breast cancer, pancreatic cancer, stomach cancer, epithelial ovarian cancer, cholectoral cancer, liver cancer, skin cancer, prostate cancer, cervical cancer, ovarian cancer, bladder cancer, oral cavity cancer, and combinations thereof. In other embodiments, the method treats one or more inflammatory diseases, conditions, and illnesses, including, but not limited to, autoinflammatory disease (AID), cryopyrin-associated periodic syndrome (CAPS), systemic lupus erythematosus (SLE), inflammatory bowel disease (IBD) and combinations thereof. In some embodiments, the method treats one or more cardiac diseases, conditions, and illnesses, including, but not limited to, myocardial infarction, heart failure (e.g., refractory or acute decompensated heart failure), arrythmias, pericarditis (e.g., refractory idiopathic pericarditis), myocarditis, sepsis-induced cardiomyopathy, atherosclerosis, coronary artery disease and combinations thereof. In some embodiments, the method treats one or more neurological diseases, conditions, and illnesses, including, but not limited to, acute thrombotic stroke, epilepsy, multiple sclerosis, Alzheimer's Disease and combinations thereof. In some embodiments, the method treats one or more ophthalmic diseases, conditions, and illnesses, including, but not limited to, uveitis, scleritis, Sjogren asthenia, dry eye and combinations thereof. In some embodiments, the method treats one or more diseases, conditions, and illnesses, including, but not limited to, chronic kidney disease, Type 2 diabetes, gastroesophageal reflux disease (GERD), non-HP-associated peptic ulcer disease, and pulmonary fibrosis.

[0583] In some embodiments, the pharmaceutical composition comprising a CRISPR gene-editing system targets IL1R1 for the treatment of a joint disease or illness. In some embodiments, the pharmaceutical composition comprising a CRISPR gene-editing system targets IL1R1 for the treatment of osteoarthritis. In some embodiments, the pharmaceutical composition comprising a CRISPR gene-editing system targets IL1R1 for the treatment of gout.

[0584] In some embodiments, the pharmaceutical composition comprising a CRISPR gene-editing system targets IL1R1 for the treatment of a musculoskeletal disorder.

[0585] In some embodiments, the pharmaceutical composition comprising a CRISPR gene-editing system targets IL1R1 for the treatment of a back or spine condition or disorder. In some embodiments, the pharmaceutical composition comprising a CRISPR gene-editing system targets IL1R1 for the treatment of low back pain. In some embodiments, the pharmaceutical composition comprising a CRISPR gene-editing system targets IL1R1 for the treatment of degenerative disc disorder. In some embodiments, the pharmaceutical composition comprising a CRISPR gene-editing system targets IL1R1 for the treatment of internal disc disruption.

### 1. Treatment of Musculoskeletal Disorders by Targeting an Interleukin-1 Receptor Gene

[0586] In one aspect, methods and pharmaceutical compositions are provided for treating a musculoskeletal disorder using a CRISPR pharmaceutical composition that targets an interleukin-1 receptor gene. In some embodiments, the CRISPR pharmaceutical composition comprises (i) an RNA-guided nuclease or a nucleic acid encoding an RNA-guided nuclease, and (ii) at least one guide RNA (gRNA), or a nucleic acid encoding at least one gRNA, targeting the interleukin-1 receptor gene, where the gRNA specifically binds a target sequence that is adjacent to a protospacer adjacent motif (PAM) sequence for the RNA-guided nuclease. In some embodiments, the CRISPR pharmaceutical composition comprises (i) an mRNA encoding an RNA-guided nuclease, and (ii) at least one gRNA targeting the interleukin-1 receptor gene. In some embodiments, the mRNA encoding the RNA-guided nuclease and the at least one gRNA are packaged in a lipid nanoparticle (LNP). In some embodiments, the musculoskeletal disorder is Rheumatoid Arthritis, Gout, Osteoarthritis, Osteoporosis, Intervertebral disc disease (IVDD), Psoriatic arthritis (PSA), Arthritis, Polymyositis, Proliferative synovitis, Malignant bone neoplasm, Sarcoid Myopathy, Cortex Bone Disorders, Idiopathic Scoliosis, Tendinopathy, Myofibrillar Myopathy, Enthesis-Related Arthritis, Ankylosing spondylitis, Degenerative, polyarthritis, Arthropathy, Osteitis Deformans, Prolapsed Lumbar Disc, Polymyositis Ossificans, Idiopathic Polymyositis, Luft Disease, Adult-onset Still's Disease, Osteoarthrosis Deformans, or Bachet's Disease. In some embodiments, a musculoskeletal disorder listed in FIG. 3 is treated with a CRISPR pharmaceutical composition targeting a gene listed as associated with the disorder in FIG. 3. For example, in some embodiments, Rheumatoid Arthritis is treated with a CRISPR pharmaceutical composition targeting an IL1R1, IL1RAP, IL1R5, IL1R6, IL1R7, or IL1R9 gene.

[0587] In some embodiments, the interleukin-1 receptor gene is an IL1R1 gene. In some embodiments, the IL1R1 gene is a human IL1R1 gene and the guide RNA comprises a crRNA sequence selected from SEQ ID NOs: 680-824. In some embodiments, the IL1R1 gene is a canine IL1R1 gene and the guide RNA comprises a crRNA sequence selected from SEQ ID NOs: 825-892 and SEQ ID NOs: 3336-3420. In some embodiments, the IL1R1 gene is an equine IL1R1 gene and the guide RNA comprises a crRNA sequence selected from SEQ ID NOs: 893-967. In some embodiments, the IL1R1 gene is a feline IL1R1 gene and the guide RNA comprises a crRNA sequence selected from SEQ ID NOs: 968-1039. In some embodiments, editing of the IL1R1 gene results in a knockout of the IL1R1 gene. In some such embodiments, the IL1R1 gene human IL1R1 gene and is a the guide RNA comprises a crRNA sequence selected from SEQ ID NOs: 680-758. In some such embodiments, the IL1R1 gene is a canine IL1R1 gene and the guide RNA comprises a crRNA sequence selected from SEQ ID NOs: 825-892. In some such embodiments, the IL1R1 gene is an equine IL1R1 gene and the guide RNA comprises a crRNA sequence selected from SEQ ID NOs: 893-922. In some such embodiments, the IL1R1 gene is a feline IL1R1 gene and the guide RNA comprises a crRNA sequence selected from SEQ ID NOs: 968-997. In some embodiments, editing of the IL1R1 gene results in a gene that expresses a membrane-bound receptor decoy protein. In some such embodiments, the IL1R1 gene is a human IL1R1 gene and the guide RNA comprises a crRNA sequence selected from SEQ ID NOs: 759-808. In some such embodiments, the IL1R1 gene is a canine IL1R1 gene and the guide RNA comprises a crRNA sequence selected from SEQ ID NOs: 3336-3401. In some such embodiments, the IL1R1 gene is an equine IL1R1 gene and the guide RNA comprises a crRNA sequence selected from SEQ ID NOs: 942-967. In some such embodiments, the IL1R1 gene is a feline IL1R1 gene and the guide RNA comprises a crRNA sequence selected from SEQ ID NOs: 1010-1039. In some embodiments, editing of the IL1R1 gene results in a gene that expresses a soluble receptor decoy protein. In some such embodiments, the IL1R1 gene is a human IL1R1 gene and the guide RNA comprises a crRNA sequence selected from SEQ ID NOs 758 and 809-811. In some such embodiments, the IL1R1 gene is a canine IL1R1 gene and the guide RNA comprises a crRNA sequence selected from SEQ ID NOs: 865-892. and SEQ ID NOS: 3402-3405. In some such embodiments, the IL1R1 gene is an equine IL1R1 gene and the guide RNA comprises a crRNA sequence selected from SEQ ID NOs: 923-941. In some such embodiments, the IL1R1 gene is a feline IL1R1 gene and the guide RNA comprises a crRNA sequence selected from SEQ ID NOs: 998-1009.

### 2. Treatment of Neoplasia by Targeting an Interleukin-1 Receptor Gene

[0588] In In one aspect, methods and pharmaceutical compositions are provided for treating a neoplasia using a CRISPR pharmaceutical composition that targets an interleukin-1 receptor gene. In some embodiments, the CRISPR pharmaceutical composition comprises (i) an RNA-guided nuclease or a nucleic acid encoding an RNA-guided nuclease, and (ii) at least one guide RNA (gRNA), or a nucleic acid encoding at least one gRNA, targeting the interleukin-1 receptor gene, where the gRNA specifically binds a target sequence that is adjacent to a protospacer adjacent motif (PAM) sequence for the RNA-guided nuclease. In some embodiments, the CRISPR pharmaceutical composition comprises (i) an mRNA encoding an RNA-guided nuclease, and (ii) at least one gRNA targeting the interleukin-1 receptor gene. In some embodiments, the mRNA encoding the RNA-guided nuclease and the at least one gRNA are packaged in a lipid nanoparticle (LNP). In some embodiments, the neoplasia is Osteosarcoma, Colon Cancer, Metastasis (General), Lung Cancer, Multiple Myeloma. Breast Cancer, Solid Tumors, Lymphoma, Pancreatic Cancer, Stomach Cancer, Epithelial Ovarian Cancer, Mammary Neoplasms, Oropharyngeal Carcinoma, Renal Cell Carcinoma, Chondrosarcoma, Esophageal Neoplasms, B-Cell Lymphoma, Cutaneous Lymphoma T-Cell, Leukemia, Thyroid Carcinoma, Skin carcinogenesis, Cholectoral Cancer, Glioma, Liver Cancer, Melanoma, Neuroblastoma, Polycystic Ovary Syndrome, Glioblastoma, Prostate Cancer, Cervical Cancer, Ovarian Cancer, Bladder Cancer, Squamous cell carcinoma, Kaposi Sarcoma, Oral Cavity Cancer, Leiomyosarcoma, Malignant Peripheral Nerve Sheath Tumor, or Ewing's Sarcoma. In some embodiments, a neoplasia listed in FIG. 3 is treated with a CRISPR pharmaceutical composition targeting a gene listed as associated with the disorder in FIG. 3. For example, in some embodiments, Osteosarcoma is treated with a CRISPR pharmaceutical composition targeting an IL1R1 gene.

[0589] In some embodiments, the interleukin-1 receptor gene is an IL1R1 gene. In some embodiments, the IL1R1 gene is a human IL1R1 gene and the guide RNA comprises a crRNA sequence selected from SEQ ID NOs: 680-824. In some embodiments, the IL1R1 gene is a canine IL1R1 gene and the guide RNA comprises a crRNA sequence selected from SEQ ID NOs: 825-892 and SEQ ID NOs: 3336-3420. In some embodiments, the IL1R1 gene is an equine IL1R1 gene and the guide RNA comprises a crRNA sequence selected from SEQ ID NOs: 893-967. In some embodiments, the IL1R1 gene is a feline IL1R1 gene and the guide RNA comprises a crRNA sequence selected from SEQ ID NOs: 968-1039. In some embodiments, editing of the IL1R1 gene results in a knockout of the IL1R1 gene. In some such embodiments, the IL1R1 gene human IL1R1 gene and is a the guide RNA comprises a crRNA sequence selected from SEQ ID NOs: 680-758. In some such embodiments, the IL1R1 gene is a canine IL1R1 gene and the guide RNA comprises a crRNA sequence selected from SEQ ID NOs: 825-892. In some such embodiments, the IL1R1 gene is an equine IL1R1 gene and the guide RNA comprises a crRNA sequence selected from SEQ ID NOs: 893-922. In some such embodiments, the IL1R1 gene is a feline IL1R1 gene and the guide RNA comprises a crRNA sequence selected from SEQ ID NOs: 968-997. In some embodiments, editing of the IL1R1 gene results in a gene that expresses a membrane-bound receptor decoy protein. In some such embodiments, the IL1R1 gene is a human IL1R1 gene and the guide RNA comprises a crRNA sequence selected from SEQ ID NOs: 759-808. In some such embodiments, the IL1R1 gene is a canine IL1R1 gene and the guide RNA comprises a crRNA sequence selected from SEQ ID NOs: 3336-3401. In some such embodiments, the IL1R1 gene is an equine IL1R1 gene and the guide RNA comprises a crRNA sequence selected from SEQ ID NOs: 942-967. In some such embodiments, the IL1R1 gene is a feline IL1R1 gene and the guide RNA comprises a crRNA sequence selected from SEQ ID NOs: 1010-1039. In some embodiments, editing of the IL1R1 gene results in a gene that expresses a soluble receptor decoy protein. In some such embodiments, the IL1R1 gene is a human IL1R1 gene and the guide RNA comprises a crRNA sequence selected from SEQ ID NOs 758 and 809-811. In some such embodiments, the IL1R1 gene is a canine IL1R1 gene and the guide RNA comprises a crRNA sequence selected from SEQ ID NOs: 865-892. and SEQ ID NOS: 3402-3405. In some such embodiments, the IL1R1 gene is an equine IL1R1 gene and the guide RNA comprises a crRNA sequence selected from SEQ ID NOs: 923-941. In some such embodiments, the IL1R1 gene is a feline IL1R1 gene and the guide RNA comprises a crRNA sequence selected from SEQ ID NOs: 998-1009.

### 3. Treatment of Neurological Disorder by Targeting an Interleukin-1 Receptor Gene

[0590] In one aspect, methods and pharmaceutical compositions are provided for treating a neurological disorder using a CRISPR pharmaceutical composition that targets an interleukin-1 receptor gene. In some embodiments, the CRISPR pharmaceutical composition comprises (i) an RNA-guided nuclease or a nucleic acid encoding an RNA-guided nuclease, and (ii) at least one guide RNA (gRNA), or a nucleic acid encoding at least one gRNA, targeting the interleukin-1 receptor gene, where the gRNA specifically binds a target sequence that is adjacent to a protospacer adjacent motif (PAM) sequence for the RNA-guided nuclease. In some embodiments, the CRISPR pharmaceutical composition comprises (i) an mRNA encoding an RNA-guided nuclease, and (ii) at least one gRNA targeting the interleukin-1 receptor gene. In some embodiments, the mRNA encoding the RNA-guided nuclease and the at least one gRNA are packaged in a lipid nanoparticle (LNP). In some embodiments, the neurological disorder is Acute Thrombotic Stroke, Epilepsy, Multiple Sclerosis, or Alzheimer's Disease. In some embodiments, a neurological disorder listed in FIG. 3 is treated with a CRISPR pharmaceutical composition targeting a gene listed as associated with the disorder in FIG. 3. For example, in some embodiments, Acute Thrombocytic Stroke is treated with a CRISPR pharmaceutical composition targeting an IL1R1, or an IL1RAP gene.

[0591] In some embodiments, the interleukin-1 receptor gene is an IL1R1 gene. In some embodiments, the IL1R1 gene is a human IL1R1 gene and the guide RNA comprises a crRNA sequence selected from SEQ ID NOs: 680-824. In some embodiments, the IL1R1 gene is a canine IL1R1 gene and the guide RNA comprises a crRNA sequence selected from SEQ ID NOs: 825-892 and SEQ ID NOs: 3336-3420. In some embodiments, the IL1R1 gene is an equine IL1R1 gene and the guide RNA comprises a crRNA sequence selected from SEQ ID NOs: 893-967. In some embodiments, the IL1R1 gene is a feline IL1R1 gene and the guide RNA comprises a crRNA sequence selected from SEQ ID NOs: 968-1039. In some embodiments, editing of the IL1R1 gene results in a knockout of the IL1R1 gene. In some such embodiments, the IL1R1 gene human IL1R1 gene and is a the guide RNA comprises a crRNA sequence selected from SEQ ID NOs: 680-758. In some such embodiments, the IL1R1 gene is a canine IL1R1 gene and the guide RNA comprises a crRNA sequence selected from SEQ ID NOs: 825-892. In some such embodiments, the IL1R1 gene is an equine IL1R1 gene and the guide RNA comprises a crRNA sequence selected from SEQ ID NOs: 893-922. In some such embodiments, the IL1R1 gene is a feline IL1R1 gene and the guide RNA comprises a crRNA sequence selected from SEQ ID NOs: 968-997. In some embodiments, editing of the IL1R1 gene results in a gene that expresses a membrane-bound receptor decoy protein. In some such embodiments, the IL1R1 gene is a human IL1R1 gene and the guide RNA comprises a crRNA sequence selected from SEQ ID NOs: 759-808. In some such embodiments, the IL1R1 gene is a canine IL1R1 gene and the guide RNA comprises a crRNA sequence selected from SEQ ID NOs: 3336-3401. In some such embodiments, the IL1R1 gene is an equine IL1R1 gene and the guide RNA comprises a crRNA sequence selected from SEQ ID NOs: 942-967. In some such embodiments, the IL1R1 gene is a feline IL1R1 gene and the guide RNA comprises a crRNA sequence selected from SEQ ID NOs: 1010-1039. In some embodiments, editing of the IL1R1 gene results in a gene that expresses a soluble receptor decoy protein. In some such embodiments, the IL1R1 gene is a human IL1R1 gene and the guide RNA comprises a crRNA sequence selected from SEQ ID NOs 758 and 809-811. In some such embodiments, the IL1R1 gene is a canine IL1R1 gene and the guide RNA comprises a crRNA sequence selected from SEQ ID NOs: 865-892. and SEQ ID NOS: 3402-3405. In some such embodiments, the IL1R1 gene is an equine IL1R1 gene and the guide RNA comprises a crRNA sequence selected from SEQ ID NOs: 923-941. In some such embodiments, the IL1R1 gene is a feline IL1R1 gene and the guide RNA comprises a crRNA sequence selected from SEQ ID NOs: 998-1009.

### 4. Treatment of Cardiac Disorder by Targeting an Interleukin-1 Receptor Gene

[0592] In one aspect, methods and pharmaceutical compositions are provided for treating a cardiac disorder using a CRISPR pharmaceutical composition that targets an interleukin-1 receptor gene. In some embodiments, the CRISPR pharmaceutical composition comprises (i) an RNA-guided nuclease or a nucleic acid encoding an RNA-guided nuclease, and (ii) at least one guide RNA (gRNA), or a nucleic acid encoding at least one gRNA, targeting the interleukin-1 receptor gene, where the gRNA specifically binds a target sequence that is adjacent to a protospacer adjacent motif (PAM) sequence for the RNA-guided nuclease. In some embodiments, the CRISPR pharmaceutical composition comprises (i) an mRNA encoding an RNA-guided nuclease, and (ii) at least one gRNA targeting the interleukin-1 receptor gene. In some embodiments, the mRNA encoding the RNA-guided nuclease and the at least one gRNA are packaged in a lipid nanoparticle (LNP). In some embodiments, the cardiac disorder is Heart disease including but not limited to Acute Myocardial Infarction, refractory heart failure, arrhythmias, pericarditis, myocarditis, and sepsis-induced cardiomyopathy; Acute Decompensated Heart Failure, Refractory Idiopathic Pericarditis, or Atherosclerosis including but not limited to coronary artery disease, myocardial infarction, and cardiac remodeling. In some embodiments, a cardiac disorder listed in FIG. 3 is treated with a CRISPR pharmaceutical composition targeting a gene listed as associated with the disorder in FIG. 3. For example, in some embodiments, Acute Decompensated Heart Failure is treated with a CRISPR pharmaceutical composition targeting an IL1R1, or an IL1RAP gene.

[0593] In some embodiments, the interleukin-1 receptor gene is an IL1R1 gene. In some embodiments, the IL1R1 gene is a human IL1R1 gene and the guide RNA comprises a crRNA sequence selected from SEQ ID NOs: 680-824. In some embodiments, the IL1R1 gene is a canine IL1R1 gene and the guide RNA comprises a crRNA sequence selected from SEQ ID NOs: 825-892 and SEQ ID NOs: 3336-3420. In some embodiments, the IL1R1 gene is an equine IL1R1 gene and the guide RNA comprises a crRNA sequence selected from SEQ ID NOs: 893-967. In some embodiments, the IL1R1 gene is a feline IL1R1 gene and the guide RNA comprises a crRNA sequence selected from SEQ ID NOs: 968-1039. In some embodiments, editing of the IL1R1 gene results in a knockout of the IL1R1 gene. In some such embodiments, the IL1R1 gene human IL1R1 gene and is a the guide RNA comprises a crRNA sequence selected from SEQ ID NOs: 680-758. In some such embodiments, the IL1R1 gene is a canine IL1R1 gene and the guide RNA comprises a crRNA sequence selected from SEQ ID NOs: 825-892. In some such embodiments, the IL1R1 gene is an equine IL1R1 gene and the guide RNA comprises a crRNA sequence selected from SEQ ID NOs: 893-922. In some such embodiments, the IL1R1 gene is a feline IL1R1 gene and the guide RNA comprises a crRNA sequence selected from SEQ ID NOs: 968-997. In some embodiments, editing of the IL1R1 gene results in a gene that expresses a membrane-bound receptor decoy protein. In some such embodiments, the IL1R1 gene is a human IL1R1 gene and the guide RNA comprises a crRNA sequence selected from SEQ ID NOs: 759-808. In some such embodiments, the IL1R1 gene is a canine IL1R1 gene and the guide RNA comprises a crRNA sequence selected from SEQ ID NOs: 3336-3401. In some such embodiments, the IL1R1 gene is an equine IL1R1 gene and the guide RNA comprises a crRNA sequence selected from SEQ ID NOs: 942-967. In some such embodiments, the IL1R1 gene is a feline IL1R1 gene and the guide RNA comprises a crRNA sequence selected from SEQ ID NOs: 1010-1039. In some embodiments, editing of the IL1R1 gene results in a gene that expresses a soluble receptor decoy protein. In some such embodiments, the IL1R1 gene is a human IL1R1 gene and the guide RNA comprises a crRNA sequence selected from SEQ ID NOs 758 and 809-811. In some such embodiments, the IL1R1 gene is a canine IL1R1 gene and the guide RNA comprises a crRNA sequence selected from SEQ ID NOs: 865-892. and SEQ ID NOS: 3402-3405. In some such embodiments, the IL1R1 gene is an equine IL1R1 gene and the guide RNA comprises a crRNA sequence selected from SEQ ID NOs: 923-941. In some such embodiments, the IL1R1 gene is a feline IL1R1 gene and the guide RNA comprises a crRNA sequence selected from SEQ ID NOs: 998-1009.

### 5. Treatment of Inflammatory Disorders by Targeting an Interleukin-1 Receptor Gene

[0594] In one aspect, methods and pharmaceutical compositions are provided for treating an inflammatory disorder using a CRISPR pharmaceutical composition that targets an interleukin-1 receptor gene. In some embodiments, the CRISPR pharmaceutical composition comprises (i) an RNA-guided nuclease or a nucleic acid encoding an RNA-guided nuclease, and (ii) at least one guide RNA (gRNA), or a nucleic acid encoding at least one gRNA, targeting the interleukin-1 receptor gene, where the gRNA specifically binds a target sequence that is adjacent to a protospacer adjacent motif (PAM) sequence for the RNA-guided nuclease. In some embodiments, the CRISPR pharmaceutical composition comprises (i) an mRNA encoding an RNA-guided nuclease, and (ii) at least one gRNA targeting the interleukin-1 receptor gene. In some embodiments, the mRNA encoding the RNA-guided nuclease and the at least one gRNA are packaged in a lipid nanoparticle (LNP). In some embodiments, the inflammatory disorder is Autoinflammatory Disease (AID), Cryopyrin Associated Periodic syndrome (CAPS), Familial Mediterranean Fever (FMF), TNF-Receptor Associated Periodic Syndrome (TRAPS), Hyper-IgD Syndrome (HIDS), Systemic Lupus Erythematosus (SLE), or Fibrosis (general). In some embodiments, an inflammatory disorder listed in FIG. 3 is treated with a CRISPR pharmaceutical composition targeting a gene listed as associated with the disorder in FIG. 3. For example, in some embodiments, an autoinflammatory disease (AID) is treated with a CRISPR pharmaceutical composition targeting an IL1R1, IL1RAP, IL1R5, or an IL1R7 gene.

[0595] In some embodiments, the interleukin-1 receptor gene is an IL1R1 gene. In some embodiments, the IL1R1 gene is a human IL1R1 gene and the guide RNA comprises a crRNA sequence selected from SEQ ID NOs: 680-824. In some embodiments, the IL1R1 gene is a canine IL1R1 gene and the guide RNA comprises a crRNA sequence selected from SEQ ID NOs: 825-892 and SEQ ID NOs: 3336-3420. In some embodiments, the IL1R1 gene is an equine IL1R1 gene and the guide RNA comprises a crRNA sequence selected from SEQ ID NOs: 893-967. In some embodiments, the IL1R1 gene is a feline IL1R1 gene and the guide RNA comprises a crRNA sequence selected from SEQ ID NOs: 968-1039. In some embodiments, editing of the IL1R1 gene results in a knockout of the IL1R1 gene. In some such embodiments, the IL1R1 gene human IL1R1 gene and is a the guide RNA comprises a crRNA sequence selected from SEQ ID NOs: 680-758. In some such embodiments, the IL1R1 gene is a canine IL1R1 gene and the guide RNA comprises a crRNA sequence selected from SEQ ID NOs: 825-892. In some such embodiments, the IL1R1 gene is an equine IL1R1 gene and the guide RNA comprises a crRNA sequence selected from SEQ ID NOs: 893-922. In some such embodiments, the IL1R1 gene is a feline IL1R1 gene and the guide RNA comprises a crRNA sequence selected from SEQ ID NOs: 968-997. In some embodiments, editing of the IL1R1 gene results in a gene that expresses a membrane-bound receptor decoy protein. In some such embodiments, the IL1R1 gene is a human IL1R1 gene and the guide RNA comprises a crRNA sequence selected from SEQ ID NOs: 759-808. In some such embodiments, the IL1R1 gene is a canine IL1R1 gene and the guide RNA comprises a crRNA sequence selected from SEQ ID NOs: 3336-3401. In some such embodiments, the IL1R1 gene is an equine IL1R1 gene and the guide RNA comprises a crRNA sequence selected from SEQ ID NOs: 942-967. In some such embodiments, the IL1R1 gene is a feline IL1R1 gene and the guide RNA comprises a crRNA sequence selected from SEQ ID NOs: 1010-1039. In some embodiments, editing of the IL1R1 gene results in a gene that expresses a soluble receptor decoy protein. In some such embodiments, the IL1R1 gene is a human IL1R1 gene and the guide RNA comprises a crRNA sequence selected from SEQ ID NOs 758 and 809-811. In some such embodiments, the IL1R1 gene is a canine IL1R1 gene and the guide RNA comprises a crRNA sequence selected from SEQ ID NOs: 865-892. and SEQ ID NOS: 3402-3405. In some such embodiments, the IL1R1 gene is an equine IL1R1 gene and the guide RNA comprises a crRNA sequence selected from SEQ ID NOs: 923-941. In some such embodiments, the IL1R1 gene is a feline IL1R1 gene and the guide RNA comprises a crRNA sequence selected from SEQ ID NOs: 998-1009.

### 6. Treatment of Digestive Disorders by Targeting an Interleukin-1 Receptor Gene

[0596] In one aspect, methods and pharmaceutical compositions are provided for treating a digestive disorder using a CRISPR pharmaceutical composition that targets an interleukin-1 receptor gene. In some embodiments, the CRISPR pharmaceutical composition comprises (i) an RNA-guided nuclease or a nucleic acid encoding an RNA-guided nuclease, and (ii) at least one guide RNA (gRNA), or a nucleic acid encoding at least one gRNA, targeting the interleukin-1 receptor gene, where the gRNA specifically binds a target sequence that is adjacent to a protospacer adjacent motif (PAM) sequence for the RNA-guided nuclease. In some embodiments, the CRISPR pharmaceutical composition comprises (i) an mRNA encoding an RNA-guided nuclease, and (ii) at least one gRNA targeting the interleukin-1 receptor gene. In some embodiments, the mRNA encoding the RNA-guided nuclease and the at least one gRNA are packaged in a lipid nanoparticle (LNP). In some embodiments, the digestive disorder is Inflammatory Bowel Disease (IBD), Gastroesophageal reflux disease (GERD), or Non-HP-associated Peptic Ulcer Disease. In some embodiments, a digestive disorder listed in FIG. 3 is treated with a CRISPR pharmaceutical composition targeting a gene listed as associated with the disorder in FIG. 3. For example, in some embodiments, an Inflammatory Bowel Disease (IBD) is treated with a CRISPR pharmaceutical composition targeting an IL1R1, IL1RAP, IL1R5, IL1R6, IL1R7, IL1R8, or an IL1R9 gene.

[0597] In some embodiments, the interleukin-1 receptor gene is an IL1R1 gene. In some embodiments, the IL1R1 gene is a human IL1R1 gene and the guide RNA comprises a crRNA sequence selected from SEQ ID NOs: 680-824. In some embodiments, the IL1R1 gene is a canine IL1R1 gene and the guide RNA comprises a crRNA sequence selected from SEQ ID NOs: 825-892 and SEQ ID NOs: 3336-3420. In some embodiments, the IL1R1 gene is an equine IL1R1 gene and the guide RNA comprises a crRNA sequence selected from SEQ ID NOs: 893-967. In some embodiments, the IL1R1 gene is a feline IL1R1 gene and the guide RNA comprises a crRNA sequence selected from SEQ ID NOs: 968-1039. In some embodiments, editing of the IL1R1 gene results in a knockout of the IL1R1 gene. In some such embodiments, the IL1R1 gene human IL1R1 gene and is a the guide RNA comprises a crRNA sequence selected from SEQ ID NOs: 680-758. In some such embodiments, the IL1R1 gene is a canine IL1R1 gene and the guide RNA comprises a crRNA sequence selected from SEQ ID NOs: 825-892. In some such embodiments, the IL1R1 gene is an equine IL1R1 gene and the guide RNA comprises a crRNA sequence selected from SEQ ID NOs: 893-922. In some such embodiments, the IL1R1 gene is a feline IL1R1 gene and the guide RNA comprises a crRNA sequence selected from SEQ ID NOs: 968-997. In some embodiments, editing of the IL1R1 gene results in a gene that expresses a membrane-bound receptor decoy protein. In some such embodiments, the IL1R1 gene is a human IL1R1 gene and the guide RNA comprises a crRNA sequence selected from SEQ ID NOs: 759-808. In some such embodiments, the IL1R1 gene is a canine IL1R1 gene and the guide RNA comprises a crRNA sequence selected from SEQ ID NOs: 3336-3401. In some such embodiments, the IL1R1 gene is an equine IL1R1 gene and the guide RNA comprises a crRNA sequence selected from SEQ ID NOs: 942-967. In some such embodiments, the IL1R1 gene is a feline IL1R1 gene and the guide RNA comprises a crRNA sequence selected from SEQ ID NOs: 1010-1039. In some embodiments, editing of the IL1R1 gene results in a gene that expresses a soluble receptor decoy protein. In some such embodiments, the IL1R1 gene is a human IL1R1 gene and the guide RNA comprises a crRNA sequence selected from SEQ ID NOs 758 and 809-811. In some such embodiments, the IL1R1 gene is a canine IL1R1 gene and the guide RNA comprises a crRNA sequence selected from SEQ ID NOs: 865-892. and SEQ ID NOS: 3402-3405. In some such embodiments, the IL1R1 gene is an equine IL1R1 gene and the guide RNA comprises a crRNA sequence selected from SEQ ID NOs: 923-941. In some such embodiments, the IL1R1 gene is a feline IL1R1 gene and the guide RNA comprises a crRNA sequence selected from SEQ ID NOs: 998-1009.

### 7. Treatment of Respiratory Disorders by Targeting an Interleukin-1 Receptor Gene

[0598] In one aspect, methods and pharmaceutical compositions are provided for treating a respiratory disorder using a CRISPR pharmaceutical composition that targets an interleukin-1 receptor gene. In some embodiments, the CRISPR pharmaceutical composition comprises (i) an RNA-guided nuclease or a nucleic acid encoding an RNA-guided nuclease, and (ii) at least one guide RNA (gRNA), or a nucleic acid encoding at least one gRNA, targeting the interleukin-1 receptor gene, where the gRNA specifically binds a target sequence that is adjacent to a protospacer adjacent motif (PAM) sequence for the RNA-guided nuclease. In some embodiments, the CRISPR pharmaceutical composition comprises (i) an mRNA encoding an RNA-guided nuclease, and (ii) at least one gRNA targeting the interleukin-1 receptor gene. In some embodiments, the mRNA encoding the RNA-guided nuclease and the at least one gRNA are packaged in a lipid nanoparticle (LNP). In some embodiments, the respiratory disorder is Asthma, or Pulmonary Fibrosis. In some embodiments, a respiratory disorder listed in FIG. 3 is treated with a CRISPR pharmaceutical composition targeting a gene listed as associated with the disorder in FIG. 3. For example, in some embodiments, Asthma is treated with a CRISPR pharmaceutical composition targeting an IL1R1, or IL1RAP gene.

[0599] In some embodiments, the interleukin-1 receptor gene is an IL1R1 gene. In some embodiments, the IL1R1 gene is a human IL1R1 gene and the guide RNA comprises a crRNA sequence selected from SEQ ID NOs: 680-824. In some embodiments, the IL1R1 gene is a canine IL1R1 gene and the guide RNA comprises a crRNA sequence selected from SEQ ID NOs: 825-892 and SEQ ID NOs: 3336-3420. In some embodiments, the IL1R1 gene is an equine IL1R1 gene and the guide RNA comprises a crRNA sequence selected from SEQ ID NOs: 893-967. In some embodiments, the IL1R1 gene is a feline IL1R1 gene and the guide RNA comprises a crRNA sequence selected from SEQ ID NOs: 968-1039. In some embodiments, editing of the IL1R1 gene results in a knockout of the IL1R1 gene. In some such embodiments, the IL1R1 gene human IL1R1 gene and is a the guide RNA comprises a crRNA sequence selected from SEQ ID NOs: 680-758. In some such embodiments, the IL1R1 gene is a canine IL1R1 gene and the guide RNA comprises a crRNA sequence selected from SEQ ID NOs: 825-892. In some such embodiments, the IL1R1 gene is an equine IL1R1 gene and the guide RNA comprises a crRNA sequence selected from SEQ ID NOs: 893-922. In some such embodiments, the IL1R1 gene is a feline IL1R1 gene and the guide RNA comprises a crRNA sequence selected from SEQ ID NOs: 968-997. In some embodiments, editing of the IL1R1 gene results in a gene that expresses a membrane-bound receptor decoy protein. In some such embodiments, the IL1R1 gene is a human IL1R1 gene and the guide RNA comprises a crRNA sequence selected from SEQ ID NOs: 759-808. In some such embodiments, the IL1R1 gene is a canine IL1R1 gene and the guide RNA comprises a crRNA sequence selected from SEQ ID NOs: 3336-3401. In some such embodiments, the IL1R1 gene is an equine IL1R1 gene and the guide RNA comprises a crRNA sequence selected from SEQ ID NOs: 942-967. In some such embodiments, the IL1R1 gene is a feline IL1R1 gene and the guide RNA comprises a crRNA sequence selected from SEQ ID NOs: 1010-1039. In some embodiments, editing of the IL1R1 gene results in a gene that expresses a soluble receptor decoy protein. In some such embodiments, the IL1R1 gene is a human IL1R1 gene and the guide RNA comprises a crRNA sequence selected from SEQ ID NOs 758 and 809-811. In some such embodiments, the IL1R1 gene is a canine IL1R1 gene and the guide RNA comprises a crRNA sequence selected from SEQ ID NOs: 865-892. and SEQ ID NOS: 3402-3405. In some such embodiments, the IL1R1 gene is an equine IL1R1 gene and the guide RNA comprises a crRNA sequence selected from SEQ ID NOs: 923-941. In some such embodiments, the IL1R1 gene is a feline IL1R1 gene and the guide RNA comprises a crRNA sequence selected from SEQ ID NOs: 998-1009.

### 8. Treatment of Renal, Metabolic, or Ophthalmic Disorders by Targeting an Interleukin-1 Receptor Gene

[0600] In one aspect, methods and pharmaceutical compositions are provided for treating a renal, metabolic, or ophthalmic disorder using a CRISPR pharmaceutical composition that targets an interleukin-1 receptor gene. In some embodiments, the CRISPR pharmaceutical composition comprises (i) an RNA-guided nuclease or a nucleic acid encoding an RNA-guided nuclease, and (ii) at least one guide RNA (gRNA), or a nucleic acid encoding at least one gRNA, targeting the interleukin-1 receptor gene, where the gRNA specifically binds a target sequence that is adjacent to a protospacer adjacent motif (PAM) sequence for the RNA-guided nuclease. In some embodiments, the CRISPR pharmaceutical composition comprises (i) an mRNA encoding an RNA-guided nuclease, and (ii) at least one gRNA targeting the interleukin-1 receptor gene. In some embodiments, the mRNA encoding the RNA-guided nuclease and the at least one gRNA are packaged in a lipid nanoparticle (LNP). In some embodiments, the renal, metabolic, or ophthalmic disorder is Chronic Kidney Disease, Type 2 Diabetes, or Eye Diseases including but not limited to Uveitis, Scleritis, Sjogren asthenia, and dry eye. In some embodiments, a renal, metabolic, or ophthalmic disorder listed in FIG. 3 is treated with a CRISPR pharmaceutical composition targeting a gene listed as associated with the disorder in FIG. 3. For example, in some embodiments, Chronic Kidney disease is treated with a CRISPR pharmaceutical composition targeting an IL1R1, or IL1RAP gene.

[0601] In some embodiments, the interleukin-1 receptor gene is an IL1R1 gene. In some embodiments, the IL1R1 gene is a human IL1R1 gene and the guide RNA comprises a crRNA sequence selected from SEQ ID NOs: 680-824. In some embodiments, the IL1R1 gene is a canine IL1R1 gene and the guide RNA comprises a crRNA sequence selected from SEQ ID NOs: 825-892 and SEQ ID NOs: 3336-3420. In some embodiments, the IL1R1 gene is an equine IL1R1 gene and the guide RNA comprises a crRNA sequence selected from SEQ ID NOs: 893-967. In some embodiments, the IL1R1 gene is a feline IL1R1 gene and the guide RNA comprises a crRNA sequence selected from SEQ ID NOs: 968-1039. In some embodiments, editing of the IL1R1 gene results in a knockout of the IL1R1 gene. In some such embodiments, the IL1R1 gene human IL1R1 gene and is a the guide RNA comprises a crRNA sequence selected from SEQ ID NOs: 680-758. In some such embodiments, the IL1R1 gene is a canine IL1R1 gene and the guide RNA comprises a crRNA sequence selected from SEQ ID NOs: 825-892. In some such embodiments, the IL1R1 gene is an equine IL1R1 gene and the guide RNA comprises a crRNA sequence selected from SEQ ID NOs: 893-922. In some such embodiments, the IL1R1 gene is a feline IL1R1 gene and the guide RNA comprises a crRNA sequence selected from SEQ ID NOs: 968-997. In some embodiments, editing of the IL1R1 gene results in a gene that expresses a membrane-bound receptor decoy protein. In some such embodiments, the IL1R1 gene is a human IL1R1 gene and the guide RNA comprises a crRNA sequence selected from SEQ ID NOs: 759-808. In some such embodiments, the IL1R1 gene is a canine IL1R1 gene and the guide RNA comprises a crRNA sequence selected from SEQ ID NOs: 3336-3401. In some such embodiments, the IL1R1 gene is an equine IL1R1 gene and the guide RNA comprises a crRNA sequence selected from SEQ ID NOs: 942-967. In some such embodiments, the IL1R1 gene is a feline IL1R1 gene and the guide RNA comprises a crRNA sequence selected from SEQ ID NOs: 1010-1039. In some embodiments, editing of the IL1R1 gene results in a gene that expresses a soluble receptor decoy protein. In some such embodiments, the IL1R1 gene is a human IL1R1 gene and the guide RNA comprises a crRNA sequence selected from SEQ ID NOs 758 and 809-811. In some such embodiments, the IL1R1 gene is a canine IL1R1 gene and the guide RNA comprises a crRNA sequence selected from SEQ ID NOs: 865-892. and SEQ ID NOS: 3402-3405. In some such embodiments, the IL1R1 gene is an equine IL1R1 gene and the guide RNA comprises a crRNA sequence selected from SEQ ID NOs: 923-941. In some such embodiments, the IL1R1 gene is a feline IL1R1 gene and the guide RNA comprises a crRNA sequence selected from SEQ ID NOs: 998-1009.

### B. IL1RAP

[0602] In some embodiments, the pharmaceutical composition comprising a CRISPR gene-editing system targets IL1RAP. In some embodiments, the CRISPR gene-editing system targeting IL1RAP is delivered to a mammalian cell via viral vector. In some embodiments, the CRISPR gene-editing system targeting IL1RAP is delivered to a mammalian cell via an AAV vector. In some embodiments, the CRISPR gene-editing system targeting IL1RAP is delivered to a mammalian cell via a lentiviral vector. In some embodiments, the CRISPR gene-editing system targeting IL1RAP is delivered to a mammalian cell via a lipid nanoparticle. In some embodiments, the CRISPR gene-editing system targeting IL1RAP is delivered to a mammalian cell via a virus-like particle. In some embodiments, the CRISPR gene-editing system targeting IL1RAP is delivered to a mammalian cell via a liposome. In some embodiments, the CRISPR gene-editing system targeting IL1RAP is delivered to a mammalian cell via a lipid nanocrystal.

[0603] In various embodiments, the pharmaceutical composition comprising a CRISPR gene-editing system that targets the IL1RAP gene is used in a method of treating a mammal in need thereof. In some embodiments, the method treats one or more joint disease or illness or one or more back or spine conditions or disorders. In some embodiments, the method treats one or more musculoskeletal diseases, conditions, and illnesses, including, but not limited to, rheumatoid arthritis, gout, osteoarthritis, osteoporosis, intervertebral disc disease (IVDD), psoriatic arthritis, arthritis, polymyositis, proliferative synovitis, bone neoplasms, sarcoid myopathy, cortex bone disorders, idiopathic scoliosis, tendinopathy, myofibrillar myopathy, enthesis-related arthritis, ankylosing spondylitis, degenerative polyarthritis, arthropathy, osteitis deformans, prolapsed lumbar disc, polymyositis ossificans, idiopathic polymyositis, Luft Disease, adult-onset Still's Disease, osteoarthritis deformans, Bachet's Disease, and combinations thereof. In other embodiments, use of the system treats one or more neoplastic diseases, conditions, and illnesses, including, but not limited to, osteosarcoma, multiple myeloma, lymphoma (e.g., B-cell or cutaneous T-cell lymphoma), leukemia, thyroid carcinoma, glioma, renal cell carcinoma, chondrosarcoma, glioblastoma, melanoma, neuroblastoma, polycystic ovary syndrome, Kaposi sarcoma, squamous cell carcinoma, leiomyosarcoma, malignant peripheral nerve sheath tumor, Ewing's sarcoma, esophageal neoplasms, colon cancer, lung cancer, breast cancer, pancreatic cancer, stomach cancer, epithelial ovarian cancer, cholectoral cancer, liver cancer, skin cancer, prostate cancer, cervical cancer, ovarian cancer, bladder cancer, oral cavity cancer, and combinations thereof. In other embodiments, the method treats one or more inflammatory diseases, conditions, and illnesses, including, but not limited to, autoinflammatory disease (AID), cryopyrin-associated periodic syndrome (CAPS), systemic lupus erythematosus (SLE), inflammatory bowel disease (IBD) and combinations thereof. In some embodiments, the method treats one or more cardiac diseases, conditions, and illnesses, including, but not limited to, myocardial infarction, heart failure (e.g., refractory or acute decompensated heart failure), arrythmias, pericarditis (e.g., refractory idiopathic pericarditis), myocarditis, sepsis-induced cardiomyopathy, atherosclerosis, coronary artery disease and combinations thereof. In some embodiments, the method treats one or more neurological diseases, conditions, and illnesses, including, but not limited to, acute thrombotic stroke, epilepsy, multiple sclerosis, Alzheimer's Disease and combinations thereof. In some embodiments, the method treats one or more ophthalmic diseases, conditions, and illnesses, including, but not limited to, uveitis, scleritis, Sjogren asthenia, dry eye and combinations thereof. In some embodiments, the method treats one or more diseases, conditions, and illnesses, including, but not limited to, chronic kidney disease, Type 2 diabetes, gastroesophageal reflux disease (GERD), non-HP-associated peptic ulcer disease, and pulmonary fibrosis.

[0604] In some embodiments, the pharmaceutical composition comprising a CRISPR gene-editing system targets IL1RAP for the treatment of a joint disease or illness. In some embodiments, the pharmaceutical composition comprising a CRISPR gene-editing system targets IL1RAP for the treatment of osteoarthritis. In some embodiments, the pharmaceutical composition comprising a CRISPR gene-editing system targets IL1RAP for the treatment of gout.

[0605] In some embodiments, the pharmaceutical composition comprising a CRISPR gene-editing system targets IL1RAP for the treatment of a musculoskeletal disorder.

[0606] In some embodiments, the pharmaceutical composition comprising a CRISPR gene-editing system targets IL1RAP for the treatment of a back or spine condition or disorder. In some embodiments, the pharmaceutical composition comprising a CRISPR gene-editing system targets IL1RAP for the treatment of low back pain. In some embodiments, the pharmaceutical composition comprising a CRISPR gene-editing system targets IL1RAP for the treatment of degenerative disc disorder. In some embodiments, the pharmaceutical composition comprising a CRISPR gene-editing system targets IL1RAP for the treatment of internal disc disruption.

### 1. Treatment of Musculoskeletal Disorders by Targeting an Interleukin-1 Receptor Gene

[0607] In one aspect, methods and pharmaceutical compositions are provided for treating a musculoskeletal disorder using a CRISPR pharmaceutical composition that targets an interleukin-1 receptor gene. In some embodiments, the CRISPR pharmaceutical composition comprises (i) an RNA-guided nuclease or a nucleic acid encoding an RNA-guided nuclease, and (ii) at least one guide RNA (gRNA), or a nucleic acid encoding at least one gRNA, targeting the interleukin-1 receptor gene, where the gRNA specifically binds a target sequence that is adjacent to a protospacer adjacent motif (PAM) sequence for the RNA-guided nuclease. In some embodiments, the CRISPR pharmaceutical composition comprises (i) an mRNA encoding an RNA-guided nuclease, and (ii) at least one gRNA targeting the interleukin-1 receptor gene. In some embodiments, the mRNA encoding the RNA-guided nuclease and the at least one gRNA are packaged in a lipid nanoparticle (LNP). In some embodiments, the musculoskeletal disorder is Rheumatoid Arthritis, Gout, Osteoarthritis, Osteoporosis, Intervertebral disc disease (IVDD), Psoriatic arthritis (PsA), Arthritis, Polymyositis, Proliferative synovitis, Malignant bone neoplasm, Sarcoid Myopathy, Cortex Bone Disorders, Idiopathic Scoliosis, Tendinopathy, Myofibrillar Myopathy, Enthesis-Related Arthritis, Ankylosing spondylitis, Degenerative, polyarthritis, Arthropathy, Osteitis Deformans, Prolapsed Lumbar Disc, Polymyositis Ossificans, Idiopathic Polymyositis, Luft Disease, Adult-onset Still's Disease, Osteoarthrosis Deformans, or Bachet's Disease. In some embodiments, a musculoskeletal disorder listed in FIG. 3 is treated with a CRISPR pharmaceutical composition targeting a gene listed as associated with the disorder in FIG. 3. For example, in some embodiments, Rheumatoid Arthritis is treated with a CRISPR pharmaceutical composition targeting an IL1R1, IL1RAP, IL1R5, IL1R6, IL1R7, or IL1R9 gene.

[0608] In some embodiments, the interleukin-1 receptor gene is an IL1RAP gene. In some embodiments, the IL1R1 gene is a human IL1RAP gene and the guide RNA comprises a crRNA sequence selected from SEQ ID NOs: 1040-1203. In some embodiments, the IL1RAP gene is a canine IL1RAP gene and the guide RNA comprises a crRNA sequence selected from SEQ ID NOs: 1204-1271 and SEQ ID NOs: 3421-3490. In some embodiments, the IL1RAP gene is an equine IL1RAP gene and the guide RNA comprises a crRNA sequence selected from SEQ ID NOs: 1272-1348. In some embodiments, the IL1R1 gene is a feline IL1RAP gene and the guide RNA comprises a crRNA sequence selected from SEQ ID NOs: 1349-1424. In some embodiments, editing of the IL1RAP gene results in a knockout of the IL1RAP gene. In some such embodiments, the IL1RAP gene is a human IL1RAP gene and the guide RNA comprises a crRNA sequence selected from SEQ ID NOs: 1040-1122. In some such embodiments, the IL1RAP gene is a canine IL1RAP gene and the guide RNA comprises a crRNA sequence selected from SEQ ID NOs: 1204-1271 and SEQ ID NOS: 3421-3458. In some such embodiments, the IL1RAP gene is an equine IL1RAP gene and the guide RNA comprises a crRNA sequence selected from SEQ ID NOs: 1272-1301. In some such embodiments, the IL1RAP gene is a feline IL1RAP gene and the guide RNA comprises a crRNA sequence selected from SEQ ID NOs: 1349-1378. In some embodiments, editing of the IL1RAP gene results in a gene that expresses a membrane-bound receptor decoy protein. In some such embodiments, the IL1RAP gene is a human IL1RAP gene and the guide RNA comprises a crRNA sequence selected from SEQ ID NOs: 1123-1180 and SEQ ID NOs: 1192-1194. In some such embodiments, the IL1RAP gene is a canine IL1RAP gene and the guide RNA comprises a crRNA sequence selected from SEQ ID NOs: 3459-3485. In some such embodiments, the IL1RAP gene is an equine IL1RAP gene and the guide RNA comprises a crRNA sequence selected from SEQ ID NOs: 1323-1348. In some such embodiments, the IL1RAP gene is a feline IL1RAP gene and the guide RNA comprises a crRNA sequence selected from SEQ ID NOs: 1397-1424. In some embodiments, editing of the IL1RAP gene results in a gene that expresses a soluble receptor decoy protein. In some such embodiments, the IL1RAP gene is a human IL1RAP gene and the guide RNA comprises a crRNA sequence selected from SEQ ID NOs: 1181-1194. In some such embodiments, the IL1RAP gene is a canine IL1RAP gene and the guide RNA comprises a crRNA sequence selected from SEQ ID NOs: 3481-3490 and SEQ ID NOs: 3453-3458. In some such embodiments, the IL1RAP gene is an equine IL1RAP gene and the guide RNA comprises a crRNA sequence selected from SEQ ID NOs: 1302-1322. In some such embodiments, the IL1R1 gene is a feline IL1RAP gene and the guide RNA comprises a crRNA sequence selected from SEQ ID NOs: 1379-1396.

### 2. Treatment of Neoplasia by Targeting an Interleukin-1 Receptor Gene

[0609] In In one aspect, methods and pharmaceutical compositions are provided for treating a neoplasia using a CRISPR pharmaceutical composition that targets an interleukin-1 receptor gene. In some embodiments, the CRISPR pharmaceutical composition comprises (i) an RNA-guided nuclease or a nucleic acid encoding an RNA-guided nuclease, and (ii) at least one guide RNA (gRNA), or a nucleic acid encoding at least one gRNA, targeting the interleukin-1 receptor gene, where the gRNA specifically binds a target sequence that is adjacent to a protospacer adjacent motif (PAM) sequence for the RNA-guided nuclease. In some embodiments, the CRISPR pharmaceutical composition comprises (i) an mRNA encoding an RNA-guided nuclease, and (ii) at least one gRNA targeting the interleukin-1 receptor gene. In some embodiments, the mRNA encoding the RNA-guided nuclease and the at least one gRNA are packaged in a lipid nanoparticle (LNP). In some embodiments, the neoplasia is Osteosarcoma, Colon Cancer, Metastasis (General), Lung Cancer, Multiple Myeloma. Breast Cancer, Solid Tumors, Lymphoma, Pancreatic Cancer, Stomach Cancer, Epithelial Ovarian Cancer, Mammary Neoplasms, Oropharyngeal Carcinoma, Renal Cell Carcinoma, Chondrosarcoma, Esophageal Neoplasms, B-Cell Lymphoma, Cutaneous Lymphoma T-Cell, Leukemia, Thyroid Carcinoma, Skin carcinogenesis, Cholectoral Cancer, Glioma, Liver Cancer, Melanoma, Neuroblastoma, Polycystic Ovary Syndrome, Glioblastoma, Prostate Cancer, Cervical Cancer, Ovarian Cancer, Bladder Cancer, Squamous cell carcinoma, Kaposi Sarcoma, Oral Cavity Cancer, Leiomyosarcoma, Malignant Peripheral Nerve Sheath Tumor, or Ewing's Sarcoma. In some embodiments, a neoplasia listed in FIG. 3 is treated with a CRISPR pharmaceutical composition targeting a gene listed as associated with the disorder in FIG. 3. For example, in some embodiments, Osteosarcoma is treated with a CRISPR pharmaceutical composition targeting an IL1R1 gene.

[0610] In some embodiments, the interleukin-1 receptor gene is an IL1RAP gene. In some embodiments, the IL1R1 gene is a human IL1RAP gene and the guide RNA comprises a crRNA sequence selected from SEQ ID NOs: 1040-1203. In some embodiments, the IL1RAP gene is a canine IL1RAP gene and the guide RNA comprises a crRNA sequence selected from SEQ ID NOs: 1204-1271 and SEQ ID NOs: 3421-3490. In some embodiments, the IL1RAP gene is an equine IL1RAP gene and the guide RNA comprises a crRNA sequence selected from SEQ ID NOs: 1272-1348. In some embodiments, the IL1R1 gene is a feline IL1RAP gene and the guide RNA comprises a crRNA sequence selected from SEQ ID NOs: 1349-1424. In some embodiments, editing of the IL1RAP gene results in a knockout of the IL1RAP gene. In some such embodiments, the IL1RAP gene is a human IL1RAP gene and the guide RNA comprises a crRNA sequence selected from SEQ ID NOs: 1040-1122. In some such embodiments, the IL1RAP gene is a canine IL1RAP gene and the guide RNA comprises a crRNA sequence selected from SEQ ID NOs: 1204-1271 and SEQ ID NOs: 3421-3458. In some such embodiments, the IL1RAP gene is an equine IL1RAP gene and the guide RNA comprises a crRNA sequence selected from SEQ ID NOs: 1272-1301. In some such embodiments, the IL1RAP gene is a feline IL1RAP gene and the guide RNA comprises a crRNA sequence selected from SEQ ID NOs: 1349-1378. In some embodiments, editing of the IL1RAP gene results in a gene that expresses a membrane-bound receptor decoy protein. In some such embodiments, the IL1RAP gene is a human IL1RAP gene and the guide RNA comprises a crRNA sequence selected from SEQ ID NOs: 1123-1180 and SEQ ID NOs: 1192-1194. In some such embodiments, the IL1RAP gene is a canine IL1RAP gene and the guide RNA comprises a crRNA sequence selected from SEQ ID NOs: 3459-3485. In some such embodiments, the IL1RAP gene is an equine IL1RAP gene and the guide RNA comprises a crRNA sequence selected from SEQ ID NOs: 1323-1348. In some such embodiments, the IL1RAP gene is a feline IL1RAP gene and the guide RNA comprises a crRNA sequence selected from SEQ ID NOs: 1397-1424. In some embodiments, editing of the IL1RAP gene results in a gene that expresses a soluble receptor decoy protein. In some such embodiments, the IL1RAP gene is a human IL1RAP gene and the guide RNA comprises a crRNA sequence selected from SEQ ID NOs: 1181-1194. In some such embodiments, the IL1RAP gene is a canine IL1RAP gene and the guide RNA comprises a crRNA sequence selected from SEQ ID NOs: 3481-3490 and SEQ ID NOs: 3453-3458. In some such embodiments, the IL1RAP gene is an equine IL1RAP gene and the guide RNA comprises a crRNA sequence selected from SEQ ID NOs: 1302-1322. In some such embodiments, the IL1R1 gene is a feline IL1RAP gene and the guide RNA comprises a crRNA sequence selected from SEQ ID NOs: 1379-1396.

### 3. Treatment of Neurological Disorder by Targeting an Interleukin-1 Receptor Gene

[0611] In one aspect, methods and pharmaceutical compositions are provided for treating a neurological disorder using a CRISPR pharmaceutical composition that targets an interleukin-1 receptor gene. In some embodiments, the CRISPR pharmaceutical composition comprises (i) an RNA-guided nuclease or a nucleic acid encoding an RNA-guided nuclease, and (ii) at least one guide RNA (gRNA), or a nucleic acid encoding at least one gRNA, targeting the interleukin-1 receptor gene, where the gRNA specifically binds a target sequence that is adjacent to a protospacer adjacent motif (PAM) sequence for the RNA-guided nuclease. In some embodiments, the CRISPR pharmaceutical composition comprises (i) an mRNA encoding an RNA-guided nuclease, and (ii) at least one gRNA targeting the interleukin-1 receptor gene. In some embodiments, the mRNA encoding the RNA-guided nuclease and the at least one gRNA are packaged in a lipid nanoparticle (LNP). In some embodiments, the neurological disorder is Acute Thrombotic Stroke, Epilepsy, Multiple Sclerosis, or Alzheimer's Disease. In some embodiments, a neurological disorder listed in FIG. 3 is treated with a CRISPR pharmaceutical composition targeting a gene listed as associated with the disorder in FIG. 3. For example, in some embodiments, Acute Thrombocytic Stroke is treated with a CRISPR pharmaceutical composition targeting an IL1R1, or an IL1RAP gene.

[0612] In some embodiments, the interleukin-1 receptor gene is an IL1RAP gene. In some embodiments, the IL1R1 gene is a human IL1RAP gene and the guide RNA comprises a crRNA sequence selected from SEQ ID NOs: 1040-1203. In some embodiments, the IL1RAP gene is a canine IL1RAP gene and the guide RNA comprises a crRNA sequence selected from SEQ ID NOs: 1204-1271 and SEQ ID NOs: 3421-3490. In some embodiments, the IL1RAP gene is an equine IL1RAP gene and the guide RNA comprises a crRNA sequence selected from SEQ ID NOs: 1272-1348. In some embodiments, the IL1R1 gene is a feline IL1RAP gene and the guide RNA comprises a crRNA sequence selected from SEQ ID NOs: 1349-1424. In some embodiments, editing of the IL1RAP gene results in a knockout of the IL1RAP gene. In some such embodiments, the IL1RAP gene is a human IL1RAP gene and the guide RNA comprises a crRNA sequence selected from SEQ ID NOs: 1040-1122. In some such embodiments, the IL1RAP gene is a canine IL1RAP gene and the guide RNA comprises a crRNA sequence selected from SEQ ID NOs: 1204-1271 and SEQ ID NOs: 3421-3458. In some such embodiments, the IL1RAP gene is an equine IL1RAP gene and the guide RNA comprises a crRNA sequence selected from SEQ ID NOs: 1272-1301. In some such embodiments, the IL1RAP gene is a feline IL1RAP gene and the guide RNA comprises a crRNA sequence selected from SEQ ID NOs: 1349-1378. In some embodiments, editing of the IL1RAP gene results in a gene that expresses a membrane-bound receptor decoy protein. In some such embodiments, the IL1RAP gene is a human IL1RAP gene and the guide RNA comprises a crRNA sequence selected from SEQ ID NOs: 1123-1180 and SEQ ID NOS: 1192-1194. In some such embodiments, the IL1RAP gene is a canine IL1RAP gene and the guide RNA comprises a crRNA sequence selected from SEQ ID NOs: 3459-3485. In some such embodiments, the IL1RAP gene is an equine IL1RAP gene and the guide RNA comprises a crRNA sequence selected from SEQ ID NOs: 1323-1348. In some such embodiments, the IL1RAP gene is a feline IL1RAP gene and the guide RNA comprises a crRNA sequence selected from SEQ ID NOs: 1397-1424. In some embodiments, editing of the IL1RAP gene results in a gene that expresses a soluble receptor decoy protein. In some such embodiments, the IL1RAP gene is a human IL1RAP gene and the guide RNA comprises a crRNA sequence selected from SEQ ID NOs: 1181-1194. In some such embodiments, the IL1RAP gene is a canine IL1RAP gene and the guide RNA comprises a crRNA sequence selected from SEQ ID NOs: 3481-3490 and SEQ ID NOs: 3453-3458. In some such embodiments, the IL1RAP gene is an equine IL1RAP gene and the guide RNA comprises a crRNA sequence selected from SEQ ID NOs: 1302-1322. In some such embodiments, the IL1R1 gene is a feline IL1RAP gene and the guide RNA comprises a crRNA sequence selected from SEQ ID NOs: 1379-1396.

### 4. Treatment of Cardiac Disorder by Targeting an Interleukin-1 Receptor Gene

[0613] In one aspect, methods and pharmaceutical compositions are provided for treating a cardiac disorder using a CRISPR pharmaceutical composition that targets an interleukin-1 receptor gene. In some embodiments, the CRISPR pharmaceutical composition comprises (i) an RNA-guided nuclease or a nucleic acid encoding an RNA-guided nuclease, and (ii) at least one guide RNA (gRNA), or a nucleic acid encoding at least one gRNA, targeting the interleukin-1 receptor gene, where the gRNA specifically binds a target sequence that is adjacent to a protospacer adjacent motif (PAM) sequence for the RNA-guided nuclease. In some embodiments, the CRISPR pharmaceutical composition comprises (i) an mRNA encoding an RNA-guided nuclease, and (ii) at least one gRNA targeting the interleukin-1 receptor gene. In some embodiments, the mRNA encoding the RNA-guided nuclease and the at least one gRNA are packaged in a lipid nanoparticle (LNP). In some embodiments, the cardiac disorder is Heart disease including but not limited to Acute Myocardial Infarction, refractory heart failure, arrhythmias, pericarditis, myocarditis, and sepsis-induced cardiomyopathy; Acute Decompensated Heart Failure, Refractory Idiopathic Pericarditis, or Atherosclerosis including but not limited to coronary artery disease, myocardial infarction, and cardiac remodeling. In some embodiments, a cardiac disorder listed in FIG. 3 is treated with a CRISPR pharmaceutical composition targeting a gene listed as associated with the disorder in FIG. 3. For example, in some embodiments, Acute Decompensated Heart Failure is treated with a CRISPR pharmaceutical composition targeting an IL1R1, or an IL1RAP gene.

[0614] In some embodiments, the interleukin-1 receptor gene is an IL1RAP gene. In some embodiments, the IL1R1 gene is a human IL1RAP gene and the guide RNA comprises a crRNA sequence selected from SEQ ID NOs: 1040-1203. In some embodiments, the IL1RAP gene is a canine IL1RAP gene and the guide RNA comprises a crRNA sequence selected from SEQ ID NOs: 1204-1271 and SEQ ID NOs: 3421-3490. In some embodiments, the IL1RAP gene is an equine IL1RAP gene and the guide RNA comprises a crRNA sequence selected from SEQ ID NOs: 1272-1348. In some embodiments, the IL1R1 gene is a feline IL1RAP gene and the guide RNA comprises a crRNA sequence selected from SEQ ID NOs: 1349-1424. In some embodiments, editing of the IL1RAP gene results in a knockout of the IL1RAP gene. In some such embodiments, the IL1RAP gene is a human IL1RAP gene and the guide RNA comprises a crRNA sequence selected from SEQ ID NOs: 1040-1122. In some such embodiments, the IL1RAP gene is a canine IL1RAP gene and the guide RNA comprises a crRNA sequence selected from SEQ ID NOs: 1204-1271 and SEQ ID NOs: 3421-3458. In some such embodiments, the IL1RAP gene is an equine IL1RAP gene and the guide RNA comprises a crRNA sequence selected from SEQ ID NOs: 1272-1301. In some such embodiments, the IL1RAP gene is a feline IL1RAP gene and the guide RNA comprises a crRNA sequence selected from SEQ ID NOs: 1349-1378. In some embodiments, editing of the IL1RAP gene results in a gene that expresses a membrane-bound receptor decoy protein. In some such embodiments, the IL1RAP gene is a human IL1RAP gene and the guide RNA comprises a crRNA sequence selected from SEQ ID NOs: 1123-1180 and SEQ ID NOs: 1192-1194. In some such embodiments, the IL1RAP gene is a canine IL1RAP gene and the guide RNA comprises a crRNA sequence selected from SEQ ID NOs: 3459-3485. In some such embodiments, the IL1RAP gene is an equine IL1RAP gene and the guide RNA comprises a crRNA sequence selected from SEQ ID NOs: 1323-1348. In some such embodiments, the IL1RAP gene is a feline IL1RAP gene and the guide RNA comprises a crRNA sequence selected from SEQ ID NOs: 1397-1424. In some embodiments, editing of the IL1RAP gene results in a gene that expresses a soluble receptor decoy protein. In some such embodiments, the IL1RAP gene is a human IL1RAP gene and the guide RNA comprises a crRNA sequence selected from SEQ ID NOs: 1181-1194. In some such embodiments, the IL1RAP gene is a canine IL1RAP gene and the guide RNA comprises a crRNA sequence selected from SEQ ID NOs: 3481-3490 and SEQ ID NOs: 3453-3458. In some such embodiments, the IL1RAP gene is an equine IL1RAP gene and the guide RNA comprises a crRNA sequence selected from SEQ ID NOs: 1302-1322. In some such embodiments, the IL1R1 gene is a feline IL1RAP gene and the guide RNA comprises a crRNA sequence selected from SEQ ID NOs: 1379-1396.

### 5. Treatment of Inflammatory Disorders by Targeting an Interleukin-1 Receptor Gene

[0615] In one aspect, methods and pharmaceutical compositions are provided for treating an inflammatory disorder using a CRISPR pharmaceutical composition that targets an interleukin-1 receptor gene. In some embodiments, the CRISPR pharmaceutical composition comprises (i) an RNA-guided nuclease or a nucleic acid encoding an RNA-guided nuclease, and (ii) at least one guide RNA (gRNA), or a nucleic acid encoding at least one gRNA, targeting the interleukin-1 receptor gene, where the gRNA specifically binds a target sequence that is adjacent to a protospacer adjacent motif (PAM) sequence for the RNA-guided nuclease. In some embodiments, the CRISPR pharmaceutical composition comprises (i) an mRNA encoding an RNA-guided nuclease, and (ii) at least one gRNA targeting the interleukin-1 receptor gene. In some embodiments, the mRNA encoding the RNA-guided nuclease and the at least one gRNA are packaged in a lipid nanoparticle (LNP). In some embodiments, the inflammatory disorder is Autoinflammatory Disease (AID), Cryopyrin Associated Periodic syndrome (CAPS), Familial Mediterranean Fever (FMF), TNF-Receptor Associated Periodic Syndrome (TRAPS), Hyper-IgD Syndrome (HIDS), Systemic Lupus Erythematosus (SLE), or Fibrosis (general). In some embodiments, an inflammatory disorder listed in FIG. 3 is treated with a CRISPR pharmaceutical composition targeting a gene listed as associated with the disorder in FIG. 3. For example, in some embodiments, an autoinflammatory disease (AID) is treated with a CRISPR pharmaceutical composition targeting an IL1R1, IL1RAP, IL1R5, or an IL1R7 gene.

[0616] In some embodiments, the interleukin-1 receptor gene is an IL1RAP gene. In some embodiments, the IL1R1 gene is a human IL1RAP gene and the guide RNA comprises a crRNA sequence selected from SEQ ID NOs: 1040-1203. In some embodiments, the IL1RAP gene is a canine IL1RAP gene and the guide RNA comprises a crRNA sequence selected from SEQ ID NOs: 1204-1271 and SEQ ID NOs: 3421-3490. In some embodiments, the IL1RAP gene is an equine IL1RAP gene and the guide RNA comprises a crRNA sequence selected from SEQ ID NOs: 1272-1348. In some embodiments, the IL1R1 gene is a feline IL1RAP gene and the guide RNA comprises a crRNA sequence selected from SEQ ID NOs: 1349-1424. In some embodiments, editing of the IL1RAP gene results in a knockout of the IL1RAP gene. In some such embodiments, the IL1RAP gene is a human IL1RAP gene and the guide RNA comprises a crRNA sequence selected from SEQ ID NOs: 1040-1122. In some such embodiments, the IL1RAP gene is a canine IL1RAP gene and the guide RNA comprises a crRNA sequence selected from SEQ ID NOs: 1204-1271 and SEQ ID NOs: 3421-3458. In some such embodiments, the IL1RAP gene is an equine IL1RAP gene and the guide RNA comprises a crRNA sequence selected from SEQ ID NOs: 1272-1301. In some such embodiments, the IL1RAP gene is a feline IL1RAP gene and the guide RNA comprises a crRNA sequence selected from SEQ ID NOs: 1349-1378. In some embodiments, editing of the IL1RAP gene results in a gene that expresses a membrane-bound receptor decoy protein. In some such embodiments, the IL1RAP gene is a human IL1RAP gene and the guide RNA comprises a crRNA sequence selected from SEQ ID NOs: 1123-1180 and SEQ ID NOs: 1192-1194. In some such embodiments, the IL1RAP gene is a canine IL1RAP gene and the guide RNA comprises a crRNA sequence selected from SEQ ID NOs: 3459-3485. In some such embodiments, the IL1RAP gene is an equine IL1RAP gene and the guide RNA comprises a crRNA sequence selected from SEQ ID NOs: 1323-1348. In some such embodiments, the IL1RAP gene is a feline IL1RAP gene and the guide RNA comprises a crRNA sequence selected from SEQ ID NOs: 1397-1424. In some embodiments, editing of the IL1RAP gene results in a gene that expresses a soluble receptor decoy protein. In some such embodiments, the IL1RAP gene is a human IL1RAP gene and the guide RNA comprises a crRNA sequence selected from SEQ ID NOs: 1181-1194. In some such embodiments, the IL1RAP gene is a canine IL1RAP gene and the guide RNA comprises a crRNA sequence selected from SEQ ID NOs: 3481-3490 and SEQ ID NOs: 3453-3458. In some such embodiments, the IL1RAP gene is an equine IL1RAP gene and the guide RNA comprises a crRNA sequence selected from SEQ ID NOs: 1302-1322. In some such embodiments, the IL1R1 gene is a feline IL1RAP gene and the guide RNA comprises a crRNA sequence selected from SEQ ID NOs: 1379-1396.

### 6. Treatment of Digestive Disorders by Targeting an Interleukin-1 Receptor Gene

[0617] In one aspect, methods and pharmaceutical compositions are provided for treating a digestive disorder using a CRISPR pharmaceutical composition that targets an interleukin-1 receptor gene. In some embodiments, the CRISPR pharmaceutical composition comprises (i) an RNA-guided nuclease or a nucleic acid encoding an RNA-guided nuclease, and (ii) at least one guide RNA (gRNA), or a nucleic acid encoding at least one gRNA, targeting the interleukin-1 receptor gene, where the gRNA specifically binds a target sequence that is adjacent to a protospacer adjacent motif (PAM) sequence for the RNA-guided nuclease. In some embodiments, the CRISPR pharmaceutical composition comprises (i) an mRNA encoding an RNA-guided nuclease, and (ii) at least one gRNA targeting the interleukin-1 receptor gene. In some embodiments, the mRNA encoding the RNA-guided nuclease and the at least one gRNA are packaged in a lipid nanoparticle (LNP). In some embodiments, the digestive disorder is Inflammatory Bowel Disease (IBD), Gastroesophageal reflux disease (GERD), or Non-HP-associated Peptic Ulcer Disease. In some embodiments, a digestive disorder listed in FIG. 3 is treated with a CRISPR pharmaceutical composition targeting a gene listed as associated with the disorder in FIG. 3. For example, in some embodiments, an Inflammatory Bowel Disease (IBD) is treated with a CRISPR pharmaceutical composition targeting an IL1R1, IL1RAP, IL1R5, IL1R6, IL1R7, IL1R8, or an IL1R9 gene.

[0618] In some embodiments, the interleukin-1 receptor gene is an IL1RAP gene. In some embodiments, the IL1R1 gene is a human IL1RAP gene and the guide RNA comprises a crRNA sequence selected from SEQ ID NOs: 1040-1203. In some embodiments, the IL1RAP gene is a canine IL1RAP gene and the guide RNA comprises a crRNA sequence selected from SEQ ID NOs: 1204-1271 and SEQ ID NOs: 3421-3490. In some embodiments, the IL1RAP gene is an equine IL1RAP gene and the guide RNA comprises a crRNA sequence selected from SEQ ID NOs: 1272-1348. In some embodiments, the IL1R1 gene is a feline IL1RAP gene and the guide RNA comprises a crRNA sequence selected from SEQ ID NOs: 1349-1424. In some embodiments, editing of the IL1RAP gene results in a knockout of the IL1RAP gene. In some such embodiments, the IL1RAP gene is a human IL1RAP gene and the guide RNA comprises a crRNA sequence selected from SEQ ID NOs: 1040-1122. In some such embodiments, the IL1RAP gene is a canine IL1RAP gene and the guide RNA comprises a crRNA sequence selected from SEQ ID NOs: 1204-1271 and SEQ ID NOs: 3421-3458. In some such embodiments, the IL1RAP gene is an equine IL1RAP gene and the guide RNA comprises a crRNA sequence selected from SEQ ID NOs: 1272-1301. In some such embodiments, the IL1RAP gene is a feline IL1RAP gene and the guide RNA comprises a crRNA sequence selected from SEQ ID NOs: 1349-1378. In some embodiments, editing of the IL1RAP gene results in a gene that expresses a membrane-bound receptor decoy protein. In some such embodiments, the IL1RAP gene is a human IL1RAP gene and the guide RNA comprises a crRNA sequence selected from SEQ ID NOs: 1123-1180 and SEQ ID NOs: 1192-1194. In some such embodiments, the IL1RAP gene is a canine IL1RAP gene and the guide RNA comprises a crRNA sequence selected from SEQ ID NOs: 3459-3485. In some such embodiments, the IL1RAP gene is an equine IL1RAP gene and the guide RNA comprises a crRNA sequence selected from SEQ ID NOs: 1323-1348. In some such embodiments, the IL1RAP gene is a feline IL1RAP gene and the guide RNA comprises a crRNA sequence selected from SEQ ID NOs: 1397-1424. In some embodiments, editing of the IL1RAP gene results in a gene that expresses a soluble receptor decoy protein. In some such embodiments, the IL1RAP gene is a human IL1RAP gene and the guide RNA comprises a crRNA sequence selected from SEQ ID NOs: 1181-1194. In some such embodiments, the IL1RAP gene is a canine IL1RAP gene and the guide RNA comprises a crRNA sequence selected from SEQ ID NOs: 3481-3490 and SEQ ID NOs: 3453-3458. In some such embodiments, the IL1RAP gene is an equine IL1RAP gene and the guide RNA comprises a crRNA sequence selected from SEQ ID NOs: 1302-1322. In some such embodiments, the IL1R1 gene is a feline IL1RAP gene and the guide RNA comprises a crRNA sequence selected from SEQ ID NOs: 1379-1396.

### 7. Treatment of Respiratory Disorders by Targeting an Interleukin-1 Receptor Gene

[0619] In one aspect, methods and pharmaceutical compositions are provided for treating a respiratory disorder using a CRISPR pharmaceutical composition that targets an interleukin-1 receptor gene. In some embodiments, the CRISPR pharmaceutical composition comprises (i) an RNA-guided nuclease or a nucleic acid encoding an RNA-guided nuclease, and (ii) at least one guide RNA (gRNA), or a nucleic acid encoding at least one gRNA, targeting the interleukin-1 receptor gene, where the gRNA specifically binds a target sequence that is adjacent to a protospacer adjacent motif (PAM) sequence for the RNA-guided nuclease. In some embodiments, the CRISPR pharmaceutical composition comprises (i) an mRNA encoding an RNA-guided nuclease, and (ii) at least one gRNA targeting the interleukin-1 receptor gene. In some embodiments, the mRNA encoding the RNA-guided nuclease and the at least one gRNA are packaged in a lipid nanoparticle (LNP). In some embodiments, the respiratory disorder is Asthma, or Pulmonary Fibrosis. In some embodiments, a respiratory disorder listed in FIG. 3 is treated with a CRISPR pharmaceutical composition targeting a gene listed as associated with the disorder in FIG. 3. For example, in some embodiments, Asthma is treated with a CRISPR pharmaceutical composition targeting an IL1R1, or IL1RAP gene.

[0620] In some embodiments, the interleukin-1 receptor gene is an IL1RAP gene. In some embodiments, the IL1R1 gene is a human IL1RAP gene and the guide RNA comprises a crRNA sequence selected from SEQ ID NOs: 1040-1203. In some embodiments, the IL1RAP gene is a canine IL1RAP gene and the guide RNA comprises a crRNA sequence selected from SEQ ID NOs: 1204-1271 and SEQ ID NOs: 3421-3490. In some embodiments, the IL1RAP gene is an equine IL1RAP gene and the guide RNA comprises a crRNA sequence selected from SEQ ID NOs: 1272-1348. In some embodiments, the IL1R1 gene is a feline IL1RAP gene and the guide RNA comprises a crRNA sequence selected from SEQ ID NOs: 1349-1424. In some embodiments, editing of the IL1RAP gene results in a knockout of the IL1RAP gene. In some such embodiments, the IL1RAP gene is a human IL1RAP gene and the guide RNA comprises a crRNA sequence selected from SEQ ID NOs: 1040-1122. In some such embodiments, the IL1RAP gene is a canine IL1RAP gene and the guide RNA comprises a crRNA sequence selected from SEQ ID NOs: 1204-1271 and SEQ ID NOs: 3421-3458. In some such embodiments, the IL1RAP gene is an equine IL1RAP gene and the guide RNA comprises a crRNA sequence selected from SEQ ID NOs: 1272-1301. In some such embodiments, the IL1RAP gene is a feline IL1RAP gene and the guide RNA comprises a crRNA sequence selected from SEQ ID NOs: 1349-1378. In some embodiments, editing of the IL1RAP gene results in a gene that expresses a membrane-bound receptor decoy protein. In some such embodiments, the IL1RAP gene is a human IL1RAP gene and the guide RNA comprises a crRNA sequence selected from SEQ ID NOs: 1123-1180 and SEQ ID NOS: 1192-1194. In some such embodiments, the IL1RAP gene is a canine IL1RAP gene and the guide RNA comprises a crRNA sequence selected from SEQ ID NOs: 3459-3485. In some such embodiments, the IL1RAP gene is an equine IL1RAP gene and the guide RNA comprises a crRNA sequence selected from SEQ ID NOs: 1323-1348. In some such embodiments, the IL1RAP gene is a feline IL1RAP gene and the guide RNA comprises a crRNA sequence selected from SEQ ID NOs: 1397-1424. In some embodiments, editing of the IL1RAP gene results in a gene that expresses a soluble receptor decoy protein. In some such embodiments, the IL1RAP gene is a human IL1RAP gene and the guide RNA comprises a crRNA sequence selected from SEQ ID NOs: 1181-1194. In some such embodiments, the IL1RAP gene is a canine IL1RAP gene and the guide RNA comprises a crRNA sequence selected from SEQ ID NOs: 3481-3490 and SEQ ID NOs: 3453-3458. In some such embodiments, the IL1RAP gene is an equine IL1RAP gene and the guide RNA comprises a crRNA sequence selected from SEQ ID NOs: 1302-1322. In some such embodiments, the IL1R1 gene is a feline IL1RAP gene and the guide RNA comprises a crRNA sequence selected from SEQ ID NOs: 1379-1396.

### 8. Treatment of Renal, Metabolic, or Ophthalmic Disorders by Targeting an Interleukin-1 Receptor Gene

[0621] In one aspect, methods and pharmaceutical compositions are provided for treating a renal, metabolic, or ophthalmic disorder using a CRISPR pharmaceutical composition that targets an interleukin-1 receptor gene. In some embodiments, the CRISPR pharmaceutical composition comprises (i) an RNA-guided nuclease or a nucleic acid encoding an RNA-guided nuclease, and (ii) at least one guide RNA (gRNA), or a nucleic acid encoding at least one gRNA, targeting the interleukin-1 receptor gene, where the gRNA specifically binds a target sequence that is adjacent to a protospacer adjacent motif (PAM) sequence for the RNA-guided nuclease. In some embodiments, the CRISPR pharmaceutical composition comprises (i) an mRNA encoding an RNA-guided nuclease, and (ii) at least one gRNA targeting the interleukin-1 receptor gene. In some embodiments, the mRNA encoding the RNA-guided nuclease and the at least one gRNA are packaged in a lipid nanoparticle (LNP). In some embodiments, the renal, metabolic, or ophthalmic disorder is Chronic Kidney Disease, Type 2 Diabetes, or Eye Diseases including but not limited to Uveitis, Scleritis, Sjogren asthenia, and dry eye. In some embodiments, a renal, metabolic, or ophthalmic disorder listed in FIG. 3 is treated with a CRISPR pharmaceutical composition targeting a gene listed as associated with the disorder in FIG. 3. For example, in some embodiments, Chronic Kidney disease is treated with a CRISPR pharmaceutical composition targeting an IL1R1, or IL1RAP gene.

[0622] In some embodiments, the interleukin-1 receptor gene is an IL1RAP gene. In some embodiments, the IL1R1 gene is a human IL1RAP gene and the guide RNA comprises a crRNA sequence selected from SEQ ID NOs: 1040-1203. In some embodiments, the IL1RAP gene is a canine IL1RAP gene and the guide RNA comprises a crRNA sequence selected from SEQ ID NOs: 1204-1271 and SEQ ID NOs: 3421-3490. In some embodiments, the IL1RAP gene is an equine IL1RAP gene and the guide RNA comprises a crRNA sequence selected from SEQ ID NOs: 1272-1348. In some embodiments, the IL1R1 gene is a feline IL1RAP gene and the guide RNA comprises a crRNA sequence selected from SEQ ID NOs: 1349-1424. In some embodiments, editing of the IL1RAP gene results in a knockout of the IL1RAP gene. In some such embodiments, the IL1RAP gene is a human IL1RAP gene and the guide RNA comprises a crRNA sequence selected from SEQ ID NOs: 1040-1122. In some such embodiments, the IL1RAP gene is a canine IL1RAP gene and the guide RNA comprises a crRNA sequence selected from SEQ ID NOs: 1204-1271 and SEQ ID NOs: 3421-3458. In some such embodiments, the IL1RAP gene is an equine IL1RAP gene and the guide RNA comprises a crRNA sequence selected from SEQ ID NOs: 1272-1301. In some such embodiments, the IL1RAP gene is a feline IL1RAP gene and the guide RNA comprises a crRNA sequence selected from SEQ ID NOs: 1349-1378. In some embodiments, editing of the IL1RAP gene results in a gene that expresses a membrane-bound receptor decoy protein. In some such embodiments, the IL1RAP gene is a human IL1RAP gene and the guide RNA comprises a crRNA sequence selected from SEQ ID NOs: 1123-1180 and SEQ ID NOs: 1192-1194. In some such embodiments, the IL1RAP gene is a canine IL1RAP gene and the guide RNA comprises a crRNA sequence selected from SEQ ID NOs: 3459-3485. In some such embodiments, the IL1RAP gene is an equine IL1RAP gene and the guide RNA comprises a crRNA sequence selected from SEQ ID NOs: 1323-1348. In some such embodiments, the IL1RAP gene is a feline IL1RAP gene and the guide RNA comprises a crRNA sequence selected from SEQ ID NOs: 1397-1424. In some embodiments, editing of the IL1RAP gene results in a gene that expresses a soluble receptor decoy protein. In some such embodiments, the IL1RAP gene is a human IL1RAP gene and the guide RNA comprises a crRNA sequence selected from SEQ ID NOs: 1181-1194. In some such embodiments, the IL1RAP gene is a canine IL1RAP gene and the guide RNA comprises a crRNA sequence selected from SEQ ID NOs: 3481-3490 and SEQ ID NOs: 3453-3458. In some such embodiments, the IL1RAP gene is an equine IL1RAP gene and the guide RNA comprises a crRNA sequence selected from SEQ ID NOs: 1302-1322. In some such embodiments, the IL1R1 gene is a feline IL1RAP gene and the guide RNA comprises a crRNA sequence selected from SEQ ID NOs: 1379-1396.

### C. TGFBR1

[0623] In some embodiments, the pharmaceutical composition comprising a CRISPR gene-editing system targets TGFBR1. In some embodiments, the CRISPR gene-editing system targeting TGFBR1 is delivered to a mammalian cell via viral vector. In some embodiments, the CRISPR gene-editing system targeting TGFBR1 is delivered to a mammalian cell via an AAV vector. In some embodiments, the CRISPR gene-editing system targeting TGFBR1 is delivered to a mammalian cell via a lentiviral vector. In some embodiments, the CRISPR gene-editing system targeting TGFBR1 is delivered to a mammalian cell via a lipid nanoparticle. In some embodiments, the CRISPR gene-editing system targeting TGFBR1 is delivered to a mammalian cell via a virus-like particle. In some embodiments, the CRISPR gene-editing system targeting TGFBR1 is delivered to a mammalian cell via a liposome. In some embodiments, the CRISPR gene-editing system targeting TGFBR1 is delivered to a mammalian cell via a lipid nanocrystal.

[0624] In various embodiments, the pharmaceutical composition comprising a CRISPR gene-editing system that targets the TGFBR1 gene is used in a method of treating a mammal in need thereof. In some embodiments, the method treats one or more joint disease or illness or one or more back or spine conditions or disorders. In some embodiments, the method treats one or more musculoskeletal diseases, conditions, and illnesses, including, but not limited to, Loeys-Dietz Syndrome, osteoarthritis, Marfan syndrome, aortic aneurysm (e.g., familial thoracic 3 aortic aneurysm), craniofacial abnormalities, and combinations thereof. In other embodiments, the method treats neoplastic diseases, conditions, and illnesses, including, but not limited to, pancreatic cancer, multiple self-healing squamous epithelioma (Ferguson-Smith disease), gastrointestinal stromal tumors (GIST), hereditary nonpolyposis colorectal cancer (Lynch Syndrome), metastatic colorectal carcinoma, bone neoplasms, anaplastic carcinoma, spindle-cell carcinoma, lung neoplasms, brain neoplasms, and combinations thereof.

[0625] In some embodiments, the pharmaceutical composition comprising a CRISPR gene-editing system targets TGFBR1 for the treatment of a joint disease or illness. In some embodiments, the pharmaceutical composition comprising a CRISPR gene-editing system targets TGFBR1 for the treatment of osteoarthritis. In some embodiments, the pharmaceutical composition comprising a CRISPR gene-editing system targets TGFBR1 for the treatment of gout.

[0626] In some embodiments, the pharmaceutical composition comprising a CRISPR gene-editing system targets TGFBR1 for the treatment of a musculoskeletal disorder.

[0627] In some embodiments, the pharmaceutical composition comprising a CRISPR gene-editing system targets TGFBR1 for the treatment of a back or spine condition or disorder. In some embodiments, the pharmaceutical composition comprising a CRISPR gene-editing system targets TGFBR1 for the treatment of low back pain. In some embodiments, the pharmaceutical composition comprising a CRISPR gene-editing system targets TGFBR1 for the treatment of degenerative disc disorder. In some embodiments, the pharmaceutical composition comprising a CRISPR gene-editing system targets TGFBR1 for the treatment of internal disc disruption.

### 1. Treatment of Musculoskeletal Disorders by Targeting an TGF-Beta Receptor Gene

[0628] In one aspect, methods and pharmaceutical compositions are provided for treating a musculoskeletal disorder using a CRISPR pharmaceutical composition that targets a Transforming Growth Factor Beta Receptor gene. In some embodiments, the CRISPR pharmaceutical composition comprises (i) an RNA-guided nuclease or a nucleic acid encoding an RNA-guided nuclease, and (ii) at least one guide RNA (gRNA), or a nucleic acid encoding at least one gRNA, targeting the Transforming Growth Factor Beta Receptor gene, where the gRNA specifically binds a target sequence that is adjacent to a protospacer adjacent motif (PAM) sequence for the RNA-guided nuclease. In some embodiments, the CRISPR pharmaceutical composition comprises (i) an mRNA encoding an RNA-guided nuclease, and (ii) at least one gRNA targeting the Transforming Growth Factor Beta Receptor gene. In some embodiments, the mRNA encoding the RNA-guided nuclease and the at least one gRNA are packaged in a lipid nanoparticle (LNP). In some embodiments, the musculoskeletal disorder is Loeys-Dietz Syndrome, Osteoarthrosis, Marfan Syndrome, Aortic aneurysm (familial thoracic 3), or Craniofacial abnormalities. In some embodiments, a musculoskeletal disorder listed in FIG. 10 is treated with a CRISPR pharmaceutical composition targeting a gene listed as associated with the disorder in FIG. 10. For example, in some embodiments, Osteoarthritis is treated with a CRISPR pharmaceutical composition targeting a TGFBR1 or TGFBR2 gene.

[0629] In some embodiments, the transforming growth factor beta receptor gene is an TGFBR1 gene. In some embodiments, the TGFBR1 gene is a human TGFBR1 gene and the guide RNA comprises a crRNA sequence selected from SEQ ID NOs: 1425-1546. In some embodiments, editing of the TGFBR1 gene results in a knockout of the TGFBR1 gene. In some such embodiments, the TGFBR1 gene is a human TGFBR1 gene and the guide RNA comprises a crRNA sequence selected from SEQ ID NOS: 1425-1454. In some embodiments, editing of the TGFBR1 gene results in a gene that expresses a membrane-bound receptor decoy protein. In some such embodiments, the TGFBR1 gene is a human TGFBR1 gene and the guide RNA comprises a crRNA sequence selected from SEQ ID NOs: 1455-1534. In some embodiments, editing of the TGFBR1 gene results in a gene that expresses a soluble receptor decoy protein. In some such embodiments, the TGFBR1 gene is a human TGFBR1 gene and the guide RNA comprises a crRNA sequence selected from SEQ ID NOs: 1535-1544.

### 2. Treatment of Neoplasia by Targeting a TGF-Beta Receptor Gene

[0630] In one aspect, methods and pharmaceutical compositions are provided for treating a neoplasia using a CRISPR pharmaceutical composition that targets a Transforming Growth Factor Beta Receptor gene. In some embodiments, the CRISPR pharmaceutical composition comprises (i) an RNA-guided nuclease or a nucleic acid encoding an RNA-guided nuclease, and (ii) at least one guide RNA (gRNA), or a nucleic acid encoding at least one gRNA, targeting the Transforming Growth Factor Beta Receptor gene, where the gRNA specifically binds a target sequence that is adjacent to a protospacer adjacent motif (PAM) sequence for the RNA-guided nuclease. In some embodiments, the CRISPR pharmaceutical composition comprises (i) an mRNA encoding an RNA-guided nuclease, and (ii) at least one gRNA targeting the Transforming Growth Factor Beta Receptor gene. In some embodiments, the mRNA encoding the RNA-guided nuclease and the at least one gRNA are packaged in a lipid nanoparticle (LNP). In some embodiments, the neoplasia is Pancreatic cancer, Multiple self-healing squamous epithelioma (Ferguson-Smith disease), Pancreatic cancer, Gastrointestinal Stromal Tumors (GIST), Hereditary Nonpolyposis Colorectal Cancer (Lynch Syndrome), Metastasis, Colorectal Carcinoma, Bone neoplasms, Anaplastic carcinoma, Spindle-Cell carcinoma, Malignant Bone Neoplasm, Lung neoplasms, or Malignant brain neoplasm. In some embodiments, a neoplasia listed in FIG. 10 is treated with a CRISPR pharmaceutical composition targeting a gene listed as associated with the disorder in FIG. 10. For example, in some embodiments, Pancreatic cancer is treated with a CRISPR pharmaceutical composition targeting a TGFBR2 gene.

[0631] In some embodiments, the transforming growth factor beta receptor gene is an TGFBR1 gene. In some embodiments, the TGFBR1 gene is a human TGFBR1 gene and the guide RNA comprises a crRNA sequence selected from SEQ ID NOS: 1425-1544. In some embodiments, editing of the TGFBR1 gene results in a knockout of the TGFBR1 gene. In some such embodiments, the TGFBR1 gene is a human TGFBR1 gene and the guide RNA comprises a crRNA sequence selected from SEQ ID NOS: 1425-1454. In some embodiments, editing of the TGFBR1 gene results in a gene that expresses a membrane-bound receptor decoy protein. In some such embodiments, the TGFBR1 gene is a human TGFBR1 gene and the guide RNA comprises a crRNA sequence selected from SEQ ID NOS: 1455-1534. In some embodiments, editing of the TGFBR1 gene results in a gene that expresses a soluble receptor decoy protein. In some such embodiments, the TGFBR1 gene is a human TGFBR1 gene and the guide RNA comprises a crRNA sequence selected from SEQ ID NOS: 1535-1544.

### D. TGFBR2

[0632] In some embodiments, the pharmaceutical composition comprising a CRISPR gene-editing system targets TGFBR2. In some embodiments, the CRISPR gene-editing system targeting TGFBR2 is delivered to a mammalian cell via viral vector. In some embodiments, the CRISPR gene-editing system targeting TGFBR2 is delivered to a mammalian cell via an AAV vector. In some embodiments, the CRISPR gene-editing system targeting TGFBR2 is delivered to a mammalian cell via a lentiviral vector. In some embodiments, the CRISPR gene-editing system targeting TGFBR2 is delivered to a mammalian cell via a lipid nanoparticle. In some embodiments, the CRISPR gene-editing system targeting TGFBR2 is delivered to a mammalian cell via a virus-like particle. In some embodiments, the CRISPR gene-editing system targeting TGFBR2 is delivered to a mammalian cell via a liposome. In some embodiments, the CRISPR gene-editing system targeting TGFBR2 is delivered to a mammalian cell via a lipid nanocrystal.

[0633] In various embodiments, the pharmaceutical composition comprising a CRISPR gene-editing system that targets the TGFBR2 gene is used in a method of treating a mammal in need thereof. In some embodiments, the method treats one or more joint disease or illness or one or more back or spine conditions or disorders. In some embodiments, the method treats one or more musculoskeletal diseases, conditions, and illnesses, including, but not limited to, Loeys-Dietz Syndrome, osteoarthritis, Marfan syndrome, aortic aneurysm (e.g., familial thoracic 3 aortic aneurysm), craniofacial abnormalities, and combinations thereof. In other embodiments, the method treats neoplastic diseases, conditions, and illnesses, including, but not limited to, pancreatic cancer, multiple self-healing squamous epithelioma (Ferguson-Smith disease), gastrointestinal stromal tumors (GIST), hereditary nonpolyposis colorectal cancer (Lynch Syndrome), metastatic colorectal carcinoma, bone neoplasms, anaplastic carcinoma, spindle-cell carcinoma, lung neoplasms, brain neoplasms, and combinations thereof.

[0634] In some embodiments, the pharmaceutical composition comprising a CRISPR gene-editing system targets TGFBR2 for the treatment of a joint disease or illness. In some embodiments, the pharmaceutical composition comprising a CRISPR gene-editing system targets TGFBR2 for the treatment of osteoarthritis. In some embodiments, the pharmaceutical composition comprising a CRISPR gene-editing system targets TGFBR2 for the treatment of gout.

[0635] In some embodiments, the pharmaceutical composition comprising a CRISPR gene-editing system targets TGFBR2 for the treatment of a musculoskeletal disorder.

[0636] In some embodiments, the pharmaceutical composition comprising a CRISPR gene-editing system targets TGFBR2 for the treatment of a back or spine condition or disorder. In some embodiments, the pharmaceutical composition comprising a CRISPR gene-editing system targets TGFBR2 for the treatment of low back pain. In some embodiments, the pharmaceutical composition comprising a CRISPR gene-editing system targets TGFBR2 for the treatment of degenerative disc disorder. In some embodiments, the pharmaceutical composition comprising a CRISPR gene-editing system targets TGFBR2 for the treatment of internal disc disruption.

### 1. Treatment of Musculoskeletal Disorders by Targeting an TGF-Beta Receptor Gene

[0637] In one aspect, methods and pharmaceutical compositions are provided for treating a musculoskeletal disorder using a CRISPR pharmaceutical composition that targets a Transforming Growth Factor Beta Receptor gene. In some embodiments, the CRISPR pharmaceutical composition comprises (i) an RNA-guided nuclease or a nucleic acid encoding an RNA-guided nuclease, and (ii) at least one guide RNA (gRNA), or a nucleic acid encoding at least one gRNA, targeting the Transforming Growth Factor Beta Receptor gene, where the gRNA specifically binds a target sequence that is adjacent to a protospacer adjacent motif (PAM) sequence for the RNA-guided nuclease. In some embodiments, the CRISPR pharmaceutical composition comprises (i) an mRNA encoding an RNA-guided nuclease, and (ii) at least one gRNA targeting the Transforming Growth Factor Beta Receptor gene. In some embodiments, the mRNA encoding the RNA-guided nuclease and the at least one gRNA are packaged in a lipid nanoparticle (LNP). In some embodiments, the musculoskeletal disorder is Loeys-Dietz Syndrome, Osteoarthrosis, Marfan Syndrome, Aortic aneurysm (familial thoracic 3), or Craniofacial abnormalities. In some embodiments, a musculoskeletal disorder listed in FIG. 10 is treated with a CRISPR pharmaceutical composition targeting a gene listed as associated with the disorder in FIG. 10. For example, in some embodiments, Osteoarthritis is treated with a CRISPR pharmaceutical composition targeting a TGFBR1 or TGFBR2 gene.

[0638] In some embodiments, the transforming growth factor beta receptor gene is an TGFBR2 gene. In some embodiments, the TGFBR2 gene is a human TGFBR2 gene and the guide RNA comprises a crRNA sequence selected from SEQ ID NOs: 1547-1734. In some embodiments, editing of the TGFBR2 gene results in a knockout of the TGFBR2 gene. In some such embodiments, the TGFBR2 gene is a human TGFBR2 gene and the guide RNA comprises a crRNA sequence selected from SEQ ID NOs: 1547-1580. In some embodiments, editing of the TGFBR2 gene results in a gene that expresses a membrane-bound receptor decoy protein. In some such embodiments, the TGFBR2 gene is a human TGFBR2 gene and the guide RNA comprises a crRNA sequence selected from SEQ ID NOs: 1581-1724. In some embodiments, editing of the TGFBR2 gene results in a gene that expresses a soluble receptor decoy protein. In some such embodiments, the TGFBR2 gene is a human TGFBR2 gene and the guide RNA comprises a crRNA sequence selected from SEQ ID NOs: 1725-1734.

### 2. Treatment of Neoplasia by Targeting a TGF-Beta Receptor Gene

[0639] In one aspect, methods and pharmaceutical compositions are provided for treating a neoplasia using a CRISPR pharmaceutical composition that targets a Transforming Growth Factor Beta Receptor gene. In some embodiments, the CRISPR pharmaceutical composition comprises (i) an RNA-guided nuclease or a nucleic acid encoding an RNA-guided nuclease, and (ii) at least one guide RNA (gRNA), or a nucleic acid encoding at least one gRNA, targeting the Transforming Growth Factor Beta Receptor gene, where the gRNA specifically binds a target sequence that is adjacent to a protospacer adjacent motif (PAM) sequence for the RNA-guided nuclease. In some embodiments, the CRISPR pharmaceutical composition comprises (i) an mRNA encoding an RNA-guided nuclease, and (ii) at least one gRNA targeting the Transforming Growth Factor Beta Receptor gene. In some embodiments, the mRNA encoding the RNA-guided nuclease and the at least one gRNA are packaged in a lipid nanoparticle (LNP). In some embodiments, the neoplasia is Pancreatic cancer, Multiple self-healing squamous epithelioma (Ferguson-Smith disease), Pancreatic cancer, Gastrointestinal Stromal Tumors (GIST), Hereditary Nonpolyposis Colorectal Cancer (Lynch Syndrome), Metastasis, Colorectal Carcinoma, Bone neoplasms, Anaplastic carcinoma, Spindle-Cell carcinoma, Malignant Bone Neoplasm, Lung neoplasms, or Malignant brain neoplasm. In some embodiments, a neoplasia listed in FIG. 10 is treated with a CRISPR pharmaceutical composition targeting a gene listed as associated with the disorder in FIG. 10. For example, in some embodiments, Pancreatic cancer is treated with a CRISPR pharmaceutical composition targeting a TGFBR2 gene.

[0640] In some embodiments, the transforming growth factor beta receptor gene is an TGFBR2 gene. In some embodiments, the TGFBR2 gene is a human TGFBR2 gene and the guide RNA comprises a crRNA sequence selected from SEQ ID NOs: 1547-1734. In some embodiments, editing of the TGFBR2 gene results in a knockout of the TGFBR2 gene. In some such embodiments, the TGFBR2 gene is a human TGFBR2 gene and the guide RNA comprises a crRNA sequence selected from SEQ ID NOs: 1547-1580. In some embodiments, editing of the TGFBR2 gene results in a gene that expresses a membrane-bound receptor decoy protein. In some such embodiments, the TGFBR2 gene is a human TGFBR2 gene and the guide RNA comprises a crRNA sequence selected from SEQ ID NOs: 1581-1724. In some embodiments, editing of the TGFBR2 gene results in a gene that expresses a soluble receptor decoy protein. In some such embodiments, the TGFBR2 gene is a human TGFBR2 gene and the guide RNA comprises a crRNA sequence selected from SEQ ID NOs: 1725-1734.

### E. IL6R

[0641] In some embodiments, the pharmaceutical composition comprising a CRISPR gene-editing system targets IL6R. In some embodiments, the CRISPR gene-editing system targeting IL6R is delivered to a mammalian cell via viral vector. In some embodiments, the CRISPR gene-editing system targeting IL6R is delivered to a mammalian cell via an AAV vector. In some embodiments, the CRISPR gene-editing system targeting IL6R is delivered to a mammalian cell via a lentiviral vector. In some embodiments, the CRISPR gene-editing system targeting IL6R is delivered to a mammalian cell via a lipid nanoparticle. In some embodiments, the CRISPR gene-editing system targeting IL6R is delivered to a mammalian cell via a virus-like particle. In some embodiments, the CRISPR gene-editing system targeting IL6R is delivered to a mammalian cell via a liposome. In some embodiments, the CRISPR gene-editing system targeting IL6R is delivered to a mammalian cell via a lipid nanocrystal.

[0642] In various embodiments, the pharmaceutical composition comprising a CRISPR gene-editing system that targets the IL6R gene is used in a method of treating a mammal in need thereof. In some embodiments, the method treats one or more joint disease or illness or one or more back or spine conditions or disorders. In some embodiments, the method treats one or more musculoskeletal diseases, conditions, and illnesses, including, but not limited to, rheumatoid arthritis, gout, osteoarthritis, osteoporosis, intervertebral disc disease (IVDD), psoriatic arthritis, arthritis, polymyositis, proliferative synovitis, bone neoplasms, sarcoid myopathy, cortex bone disorders, idiopathic scoliosis, tendinopathy, myofibrillar myopathy, enthesis-related arthritis, ankylosing spondylitis, degenerative polyarthritis, arthropathy, osteitis deformans, prolapsed lumbar disc, polymyositis ossificans, idiopathic polymyositis, Luft Disease, adult-onset Still's Disease, osteoarthritis deformans, Bachet's Disease, and combinations thereof. In other embodiments, use of the system treats one or more neoplastic diseases, conditions, and illnesses, including, but not limited to, osteosarcoma, multiple myeloma, lymphoma (e.g., B-cell or cutaneous T-cell lymphoma), leukemia, thyroid carcinoma, glioma, renal cell carcinoma, chondrosarcoma, glioblastoma, melanoma, neuroblastoma, polycystic ovary syndrome, Kaposi sarcoma, squamous cell carcinoma, leiomyosarcoma, malignant peripheral nerve sheath tumor, Ewing's sarcoma, esophageal neoplasms, colon cancer, lung cancer, breast cancer, pancreatic cancer, stomach cancer, epithelial ovarian cancer, cholectoral cancer, liver cancer, skin cancer, prostate cancer, cervical cancer, ovarian cancer, bladder cancer, oral cavity cancer, and combinations thereof. In other embodiments, the method treats one or more inflammatory diseases, conditions, and illnesses, including, but not limited to, autoinflammatory disease (AID), cryopyrin-associated periodic syndrome (CAPS), systemic lupus erythematosus (SLE), inflammatory bowel disease (IBD) and combinations thereof. In some embodiments, the method treats one or more cardiac diseases, conditions, and illnesses, including, but not limited to, myocardial infarction, heart failure (e.g., refractory or acute decompensated heart failure), arrythmias, pericarditis (e.g., refractory idiopathic pericarditis), myocarditis, sepsis-induced cardiomyopathy, atherosclerosis, coronary artery disease and combinations thereof. In some embodiments, the method treats one or more neurological diseases, conditions, and illnesses, including, but not limited to, acute thrombotic stroke, epilepsy, multiple sclerosis, Alzheimer's Disease and combinations thereof. In some embodiments, the method treats one or more ophthalmic diseases, conditions, and illnesses, including, but not limited to, uveitis, scleritis, Sjogren asthenia, dry eye and combinations thereof. In some embodiments, the method treats one or more diseases, conditions, and illnesses, including, but not limited to, chronic kidney disease, Type 2 diabetes, gastroesophageal reflux disease (GERD), non-HP-associated peptic ulcer disease, and pulmonary fibrosis.

[0643] In some embodiments, the pharmaceutical composition comprising a CRISPR gene-editing system targets IL6R for the treatment of a joint disease or illness. In some embodiments, the pharmaceutical composition comprising a CRISPR gene-editing system targets IL6R for the treatment of osteoarthritis. In some embodiments, the pharmaceutical composition comprising a CRISPR gene-editing system targets IL6R for the treatment of gout.

[0644] In some embodiments, the pharmaceutical composition comprising a CRISPR gene-editing system targets IL6R for the treatment of a musculoskeletal disorder.

[0645] In some embodiments, the pharmaceutical composition comprising a CRISPR gene-editing system targets IL6R for the treatment of a back or spine condition or disorder. In some embodiments, the pharmaceutical composition comprising a CRISPR gene-editing system targets IL6R for the treatment of low back pain. In some embodiments, the pharmaceutical composition comprising a CRISPR gene-editing system targets IL6R for the treatment of degenerative disc disorder. In some embodiments, the pharmaceutical composition comprising a CRISPR gene-editing system targets IL6R for the treatment of internal disc disruption.

### 1. Treatment of Musculoskeletal Disorders by Targeting an Interleukin-6 Receptor Gene

[0646] In one aspect, methods and pharmaceutical compositions are provided for treating a musculoskeletal disorder using a CRISPR pharmaceutical composition that targets an interleukin-6 receptor gene. In some embodiments, the CRISPR pharmaceutical composition comprises (i) an RNA-guided nuclease or a nucleic acid encoding an RNA-guided nuclease, and (ii) at least one guide RNA (gRNA), or a nucleic acid encoding at least one gRNA, targeting the interleukin-6 receptor gene, where the gRNA specifically binds a target sequence that is adjacent to a protospacer adjacent motif (PAM) sequence for the RNA-guided nuclease. In some embodiments, the CRISPR pharmaceutical composition comprises (i) an mRNA encoding an RNA-guided nuclease, and (ii) at least one gRNA targeting the interleukin-6 receptor gene. In some embodiments, the mRNA encoding the RNA-guided nuclease and the at least one gRNA are packaged in a lipid nanoparticle (LNP). In some embodiments, the musculoskeletal disorder is Rheumatoid arthritis, Idiopathic osteoporosis, Post-menopausal osteoporosis, Paget's disease, Osteoarthritis, Juvenile idiopathic arthritis (JIA), Still's disease, Ankylosing spondylitis, Polymyalgia rheumatica, Arthritis, Secondary malignant neoplasm of bone, Type II, Mucolipidosis, Sjogren's Syndrome, Psoriatic arthritis, Rheumatism, Castleman's disease, Degenerative Polyarthritis, Arthropathy, Bone neoplasm, Osteoporosis, Massive osteolysis, Bone fracture healing, Systemic sclerosis, Systemic Juvenile Idiopathic, Arthritis, or Synovitis. In some embodiments, a musculoskeletal disorder listed in FIG. 4 is treated with a CRISPR pharmaceutical composition targeting a gene listed as associated with the disorder in FIG. 4. For example, in some embodiments, Rheumatoid Arthritis is treated with a CRISPR pharmaceutical composition targeting an IL6R or IL6ST gene.

[0647] In some embodiments, the interleukin-6 receptor gene is an IL6R gene. In some embodiments, the IL6R gene is a human IL6R gene and the guide RNA comprises a crRNA sequence selected from SEQ ID NOs: 1746-1968. In some embodiments, editing of the IL6R gene results in a knockout of the IL6R gene. In some such embodiments, the IL6R gene is a human IL6R gene and the guide RNA comprises a crRNA sequence selected from SEQ ID SEQ ID NOs: 1746-1907. In some embodiments, editing of the IL6R gene results in a gene that expresses a soluble receptor decoy protein. In some such embodiments, the IL6R gene is a human IL6R gene and the guide RNA comprises a crRNA sequence selected from SEQ ID SEQ ID NOs: 1835-1920.

### 2. Treatment of Neoplasia by Targeting an Interleukin-6 Receptor Gene

[0648] In one aspect, methods and pharmaceutical compositions are provided for treating a neoplasia using a CRISPR pharmaceutical composition that targets an interleukin-6 receptor gene. In some embodiments, the CRISPR pharmaceutical composition comprises (i) an RNA-guided nuclease or a nucleic acid encoding an RNA-guided nuclease, and (ii) at least one guide RNA (gRNA), or a nucleic acid encoding at least one gRNA, targeting the interleukin-6 receptor gene, where the gRNA specifically binds a target sequence that is adjacent to a protospacer adjacent motif (PAM) sequence for the RNA-guided nuclease. In some embodiments, the CRISPR pharmaceutical composition comprises (i) an mRNA encoding an RNA-guided nuclease, and (ii) at least one gRNA targeting the interleukin-6 receptor gene. In some embodiments, the mRNA encoding the RNA-guided nuclease and the at least one gRNA are packaged in a lipid nanoparticle (LNP). In some embodiments, the neoplasia is Multiple myeloma, Lung Cancer, Stomach Cancer, Breast Cancer, Kidney Cancer, Neoplasm Metastasis, Colorectal Neoplasms, Ovarian cancer, Osteosarcoma, Cholangiocarcinoma, Leukemia, Prostate cancer, Plasmacytoma, Pancreatic cancer, Cervical cancer, Lymphoma, Liver neoplasms, Neuroblastoma, Melanoma, Mastocytosis, Endometrial cancer, Bladder Cancer, Squamous cell carcinoma, Gallbladder carcinoma, Adenocarcinoma, Thyroid Cancer, prostate neoplasms, stomach cancer, liver carcinoma, pituitary neoplasms, hepatoblastoma, multiple myeloma, hepatocellular adenoma, breast carcinoma, carcinogenesis, leukemia, colon carcinoma, melanoma, metastasis (general), lung cancer, pancreatic cancer, Kaposi sarcoma, medulloblastoma, carcinoma of bladder, squamous cell carcinoma, mast cell neoplasm, glioma, mastocytoma, brain neoplasms, ovarian neoplasms, bone neoplasm, rhabdomyosarcoma, solid tumors, metastatic kidney cancer, or metastatic renal cell carcinoma. In some embodiments, a neoplasia listed in FIG. 4 is treated with a CRISPR pharmaceutical composition targeting a gene listed as associated with the disorder in FIG. 4. For example, in some embodiments, Prostate Cancer is treated with a CRISPR pharmaceutical composition targeting an IL6R or IL6ST gene.

[0649] In some embodiments, the interleukin-6 receptor gene is an IL6R gene. In some embodiments, the IL6R gene is a human IL6R gene and the guide RNA comprises a crRNA sequence selected from SEQ ID NOs: 1746-1968. In some embodiments, editing of the IL6R gene results in a knockout of the IL6R gene. In some such embodiments, the IL6R gene is a human IL6R gene and the guide RNA comprises a crRNA sequence selected from SEQ ID SEQ ID NOs: 1746-1907. In some embodiments, editing of the IL6R gene results in a gene that expresses a soluble receptor decoy protein. In some such embodiments, the IL6R gene is a human IL6R gene and the guide RNA comprises a crRNA sequence selected from SEQ ID SEQ ID NOs: 1835-1920.

### 3. Treatment of Inflammatory Disorders by Targeting an Interleukin-6 Receptor Gene

[0650] In one aspect, methods and pharmaceutical compositions are provided for treating an inflammatory disorder using a CRISPR pharmaceutical composition that targets an interleukin-6 receptor gene. In some embodiments, the CRISPR pharmaceutical composition comprises (i) an RNA-guided nuclease or a nucleic acid encoding an RNA-guided nuclease, and (ii) at least one guide RNA (gRNA), or a nucleic acid encoding at least one gRNA, targeting the interleukin-6 receptor gene, where the gRNA specifically binds a target sequence that is adjacent to a protospacer adjacent motif (PAM) sequence for the RNA-guided nuclease. In some embodiments, the CRISPR pharmaceutical composition comprises (i) an mRNA encoding an RNA-guided nuclease, and (ii) at least one gRNA targeting the interleukin-6 receptor gene. In some embodiments, the mRNA encoding the RNA-guided nuclease and the at least one gRNA are packaged in a lipid nanoparticle (LNP). In some embodiments, the inflammatory disorder is an Inflammatory disease (e.g. cytokine storm in COVID 19 or post-CAR-T therapy), acute local inflammation, inflammatory bowel disease, Crohn's disease, Experimental sepsis, or Castleman's disease.

[0651] In some embodiments, the interleukin-6 receptor gene is an IL6R gene. In some embodiments, the IL6R gene is a human IL6R gene and the guide RNA comprises a crRNA sequence selected from SEQ ID NOs: 1746-1968. In some embodiments, editing of the IL6R gene results in a knockout of the IL6R gene. In some such embodiments, the IL6R gene is a human IL6R gene and the guide RNA comprises a crRNA sequence selected from SEQ ID SEQ ID NOs: 1746-1907. In some embodiments, editing of the IL6R gene results in a gene that expresses a soluble receptor decoy protein. In some such embodiments, the IL6R gene is a human IL6R gene and the guide RNA comprises a crRNA sequence selected from SEQ ID SEQ ID NOs: 1835-1920.

### 4. Treatment of Cardiac Disorder by Targeting an Interleukin-6 Receptor Gene

[0652] In one aspect, methods and pharmaceutical compositions are provided for treating a cardiac disorder using a CRISPR pharmaceutical composition that targets an interleukin-6 receptor gene. In some embodiments, the CRISPR pharmaceutical composition comprises (i) an RNA-guided nuclease or a nucleic acid encoding an RNA-guided nuclease, and (ii) at least one guide RNA (gRNA), or a nucleic acid encoding at least one gRNA, targeting the interleukin-6 receptor gene, where the gRNA specifically binds a target sequence that is adjacent to a protospacer adjacent motif (PAM) sequence for the RNA-guided nuclease. In some embodiments, the CRISPR pharmaceutical composition comprises (i) an mRNA encoding an RNA-guided nuclease, and (ii) at least one gRNA targeting the interleukin-6 receptor gene. In some embodiments, the mRNA encoding the RNA-guided nuclease and the at least one gRNA are packaged in a lipid nanoparticle (LNP). In some embodiments, the cardiac disorder is atherosclerosis, or abdominal aortic aneurism. In some embodiments, a cardiac disorder listed in FIG. 4 is treated with a CRISPR pharmaceutical composition targeting a gene listed as associated with the disorder in FIG. 4. For example, in some embodiments, atherosclerosis is treated with a CRISPR pharmaceutical composition targeting an IL6R or IL6ST gene.

[0653] In some embodiments, the interleukin-6 receptor gene is an IL6R gene. In some embodiments, the IL6R gene is a human IL6R gene and the guide RNA comprises a crRNA sequence selected from SEQ ID NOs: 1746-1968. In some embodiments, editing of the IL6R gene results in a knockout of the IL6R gene. In some such embodiments, the IL6R gene is a human IL6R gene and the guide RNA comprises a crRNA sequence selected from SEQ ID SEQ ID NOs: 1746-1907. In some embodiments, editing of the IL6R gene results in a gene that expresses a soluble receptor decoy protein. In some such embodiments, the IL6R gene is a human IL6R gene and the guide RNA comprises a crRNA sequence selected from SEQ ID SEQ ID NOs: 1835-1920.

### 5. Treatment of Autoimmune Disorder by Targeting an Interleukin-6 Receptor Gene

[0654] In one aspect, methods and pharmaceutical compositions are provided for treating an autoimmune disorder using a CRISPR pharmaceutical composition that targets an interleukin-6 receptor gene. In some embodiments, the CRISPR pharmaceutical composition comprises (i) an RNA-guided nuclease or a nucleic acid encoding an RNA-guided nuclease, and (ii) at least one guide RNA (gRNA), or a nucleic acid encoding at least one gRNA, targeting the interleukin-6 receptor gene, where the gRNA specifically binds a target sequence that is adjacent to a protospacer adjacent motif (PAM) sequence for the RNA-guided nuclease. In some embodiments, the CRISPR pharmaceutical composition comprises (i) an mRNA encoding an RNA-guided nuclease, and (ii) at least one gRNA targeting the interleukin-6 receptor gene. In some embodiments, the mRNA encoding the RNA-guided nuclease and the at least one gRNA are packaged in a lipid nanoparticle (LNP). In some embodiments, the autoimmune disorder is Systemic Lupus Erythematosus. In some embodiments, an autoimmune disorder listed in FIG. 4 is treated with a CRISPR pharmaceutical composition targeting a gene listed as associated with the disorder in FIG. 4. For example, in some embodiments, Systemic Lupus Erythematosus is treated with a CRISPR pharmaceutical composition targeting an IL6R or IL6ST gene.

[0655] In some embodiments, the interleukin-6 receptor gene is an IL6R gene. In some embodiments, the IL6R gene is a human IL6R gene and the guide RNA comprises a crRNA sequence selected from SEQ ID NOs: 1746-1968. In some embodiments, editing of the IL6R gene results in a knockout of the IL6R gene. In some such embodiments, the IL6R gene is a human IL6R gene and the guide RNA comprises a crRNA sequence selected from SEQ ID SEQ ID NOs: 1746-1907. In some embodiments, editing of the IL6R gene results in a gene that expresses a soluble receptor decoy protein. In some such embodiments, the IL6R gene is a human IL6R gene and the guide RNA comprises a crRNA sequence selected from SEQ ID SEQ ID NOs: 1835-1920.

### F. IL6ST

[0656] In some embodiments, the pharmaceutical composition comprising a CRISPR gene-editing system targets IL6ST. In some embodiments, the CRISPR gene-editing system targeting IL6ST is delivered to a mammalian cell via viral vector. In some embodiments, the CRISPR gene-editing system targeting IL6ST is delivered to a mammalian cell via an AAV vector. In some embodiments, the CRISPR gene-editing system targeting IL6ST is delivered to a mammalian cell via a lentiviral vector. In some embodiments, the CRISPR gene-editing system targeting IL6ST is delivered to a mammalian cell via a lipid nanoparticle. In some embodiments, the CRISPR gene-editing system targeting IL6ST is delivered to a mammalian cell via a virus-like particle. In some embodiments, the CRISPR gene-editing system targeting IL6ST is delivered to a mammalian cell via a liposome. In some embodiments, the CRISPR gene-editing system targeting IL6ST is delivered to a mammalian cell via a lipid nanocrystal.

[0657] In various embodiments, the pharmaceutical composition comprising a CRISPR gene-editing system that targets the IL6ST gene is used in a method of treating a mammal in need thereof. In some embodiments, the method treats one or more joint disease or illness or one or more back or spine conditions or disorders. In some embodiments, the method treats one or more musculoskeletal diseases, conditions, and illnesses, including, but not limited to, rheumatoid arthritis, gout, osteoarthritis, osteoporosis, intervertebral disc disease (IVDD), psoriatic arthritis, arthritis, polymyositis, proliferative synovitis, bone neoplasms, sarcoid myopathy, cortex bone disorders, idiopathic scoliosis, tendinopathy, myofibrillar myopathy, enthesis-related arthritis, ankylosing spondylitis, degenerative polyarthritis, arthropathy, osteitis deformans, prolapsed lumbar disc, polymyositis ossificans, idiopathic polymyositis, Luft Disease, adult-onset Still's Disease, osteoarthritis deformans, Bachet's Disease, and combinations thereof. In other embodiments, use of the system treats one or more neoplastic diseases, conditions, and illnesses, including, but not limited to, osteosarcoma, multiple myeloma, lymphoma (e.g., B-cell or cutaneous T-cell lymphoma), leukemia, thyroid carcinoma, glioma, renal cell carcinoma, chondrosarcoma, glioblastoma, melanoma, neuroblastoma, polycystic ovary syndrome, Kaposi sarcoma, squamous cell carcinoma, leiomyosarcoma, malignant peripheral nerve sheath tumor, Ewing's sarcoma, esophageal neoplasms, colon cancer, lung cancer, breast cancer, pancreatic cancer, stomach cancer, epithelial ovarian cancer, cholectoral cancer, liver cancer, skin cancer, prostate cancer, cervical cancer, ovarian cancer, bladder cancer, oral cavity cancer, and combinations thereof. In other embodiments, the method treats one or more inflammatory diseases, conditions, and illnesses, including, but not limited to, autoinflammatory disease (AID), cryopyrin-associated periodic syndrome (CAPS), systemic lupus erythematosus (SLE), inflammatory bowel disease (IBD) and combinations thereof. In some embodiments, the method treats one or more cardiac diseases, conditions, and illnesses, including, but not limited to, myocardial infarction, heart failure (e.g., refractory or acute decompensated heart failure), arrythmias, pericarditis (e.g., refractory idiopathic pericarditis), myocarditis, sepsis-induced cardiomyopathy, atherosclerosis, coronary artery disease and combinations thereof. In some embodiments, the method treats one or more neurological diseases, conditions, and illnesses, including, but not limited to, acute thrombotic stroke, epilepsy, multiple sclerosis, Alzheimer's Disease and combinations thereof. In some embodiments, the method treats one or more ophthalmic diseases, conditions, and illnesses, including, but not limited to, uveitis, scleritis, Sjogren asthenia, dry eye and combinations thereof. In some embodiments, the method treats one or more diseases, conditions, and illnesses, including, but not limited to, chronic kidney disease, Type 2 diabetes, gastroesophageal reflux disease (GERD), non-HP-associated peptic ulcer disease, and pulmonary fibrosis.

[0658] In some embodiments, the pharmaceutical composition comprising a CRISPR gene-editing system targets IL6ST for the treatment of a joint disease or illness. In some embodiments, the pharmaceutical composition comprising a CRISPR gene-editing system targets IL6ST for the treatment of osteoarthritis. In some embodiments, the pharmaceutical composition comprising a CRISPR gene-editing system targets IL6ST for the treatment of gout.

[0659] In some embodiments, the pharmaceutical composition comprising a CRISPR gene-editing system targets IL6ST for the treatment of a musculoskeletal disorder.

[0660] In some embodiments, the pharmaceutical composition comprising a CRISPR gene-editing system targets IL6ST for the treatment of a back or spine condition or disorder. In some embodiments, the pharmaceutical composition comprising a CRISPR gene-editing system targets IL6ST for the treatment of low back pain. In some embodiments, the pharmaceutical composition comprising a CRISPR gene-editing system targets IL6ST for the treatment of degenerative disc disorder. In some embodiments, the pharmaceutical composition comprising a CRISPR gene-editing system targets IL6ST for the treatment of internal disc disruption.

### 1. Treatment of Musculoskeletal Disorders by Targeting an Interleukin-6 Receptor Gene

[0661] In one aspect, methods and pharmaceutical compositions are provided for treating a musculoskeletal disorder using a CRISPR pharmaceutical composition that targets an interleukin-6 receptor gene. In some embodiments, the CRISPR pharmaceutical composition comprises (i) an RNA-guided nuclease or a nucleic acid encoding an RNA-guided nuclease, and (ii) at least one guide RNA (gRNA), or a nucleic acid encoding at least one gRNA, targeting the interleukin-6 receptor gene, where the gRNA specifically binds a target sequence that is adjacent to a protospacer adjacent motif (PAM) sequence for the RNA-guided nuclease. In some embodiments, the CRISPR pharmaceutical composition comprises (i) an mRNA encoding an RNA-guided nuclease, and (ii) at least one gRNA targeting the interleukin-6 receptor gene. In some embodiments, the mRNA encoding the RNA-guided nuclease and the at least one gRNA are packaged in a lipid nanoparticle (LNP). In some embodiments, the musculoskeletal disorder is Rheumatoid arthritis, Idiopathic osteoporosis, Post-menopausal osteoporosis, Paget's disease, Osteoarthritis, Juvenile idiopathic arthritis (JIA), Still's disease, Ankylosing spondylitis, Polymyalgia rheumatica, Arthritis, Secondary malignant neoplasm of bone, Type II, Mucolipidosis, Sjogren's Syndrome, Psoriatic arthritis, Rheumatism, Castleman's disease, Degenerative Polyarthritis, Arthropathy, Bone neoplasm, Osteoporosis, Massive osteolysis, Bone fracture healing, Systemic sclerosis, Systemic Juvenile Idiopathic, Arthritis, or Synovitis. In some embodiments, a musculoskeletal disorder listed in FIG. 4 is treated with a CRISPR pharmaceutical composition targeting a gene listed as associated with the disorder in FIG. 4. For example, in some embodiments, Rheumatoid Arthritis is treated with a CRISPR pharmaceutical composition targeting an IL6R or IL6ST gene.

[0662] In some embodiments, the interleukin-6 receptor gene is an IL6ST gene. In some embodiments, the IL6ST gene is a human IL6ST gene and the guide RNA comprises a crRNA sequence selected from SEQ ID NOs: 1969-2178. In some embodiments, editing of the IL6ST gene results in a knockout of the IL6ST gene. In some such embodiments, the IL6ST gene is a human IL6ST gene and the guide RNA comprises a crRNA sequence selected from SEQ ID NOs: 1969-2037. In some embodiments, editing of the IL6ST gene results in a gene that expresses a membrane-bound receptor decoy protein. In some such embodiments, the IL6ST gene is a human IL6ST gene and the guide RNA comprises a crRNA sequence selected from SEQ ID NOs: 2038-2102. In some embodiments, editing of the IL6ST gene results in a gene that expresses a soluble receptor decoy protein. In some such embodiments, the IL6ST gene is a human IL6ST gene and the guide RNA comprises a crRNA sequence selected from SEQ ID NOs: 2103-2176.

### 2. Treatment of Neoplasia by Targeting an Interleukin-6 Receptor Gene

[0663] In one aspect, methods and pharmaceutical compositions are provided for treating a neoplasia using a CRISPR pharmaceutical composition that targets an interleukin-6 receptor gene. In some embodiments, the CRISPR pharmaceutical composition comprises (i) an RNA-guided nuclease or a nucleic acid encoding an RNA-guided nuclease, and (ii) at least one guide RNA (gRNA), or a nucleic acid encoding at least one gRNA, targeting the interleukin-6 receptor gene, where the gRNA specifically binds a target sequence that is adjacent to a protospacer adjacent motif (PAM) sequence for the RNA-guided nuclease. In some embodiments, the CRISPR pharmaceutical composition comprises (i) an mRNA encoding an RNA-guided nuclease, and (ii) at least one gRNA targeting the interleukin-6 receptor gene. In some embodiments, the mRNA encoding the RNA-guided nuclease and the at least one gRNA are packaged in a lipid nanoparticle (LNP). In some embodiments, the neoplasia is Multiple myeloma, Lung Cancer, Stomach Cancer, Breast Cancer, Kidney Cancer, Neoplasm Metastasis, Colorectal Neoplasms, Ovarian cancer, Osteosarcoma, Cholangiocarcinoma, Leukemia, Prostate cancer, Plasmacytoma, Pancreatic cancer, Cervical cancer, Lymphoma, Liver neoplasms, Neuroblastoma, Melanoma, Mastocytosis, Endometrial cancer, Bladder Cancer, Squamous cell carcinoma, Gallbladder carcinoma, Adenocarcinoma, Thyroid Cancer, prostate neoplasms, stomach cancer, liver carcinoma, pituitary neoplasms, hepatoblastoma, multiple myeloma, hepatocellular adenoma, breast carcinoma, carcinogenesis, leukemia, colon carcinoma, melanoma, metastasis (general), lung cancer, pancreatic cancer, Kaposi sarcoma, medulloblastoma, carcinoma of bladder, squamous cell carcinoma, mast cell neoplasm, glioma, mastocytoma, brain neoplasms, ovarian neoplasms, bone neoplasm, rhabdomyosarcoma, solid tumors, metastatic kidney cancer, or metastatic renal cell carcinoma. In some embodiments, a neoplasia listed in FIG. 4 is treated with a CRISPR pharmaceutical composition targeting a gene listed as associated with the disorder in FIG. 4. For example, in some embodiments, Prostate Cancer is treated with a CRISPR pharmaceutical composition targeting an IL6R or IL6ST gene.

[0664] In some embodiments, the interleukin-6 receptor gene is an IL6ST gene. In some embodiments, the IL6ST gene is a human IL6ST gene and the guide RNA comprises a crRNA sequence selected from SEQ ID NOs: 1969-2178. In some embodiments, editing of the IL6ST gene results in a knockout of the IL6ST gene. In some such embodiments, the IL6ST gene is a human IL6ST gene and the guide RNA comprises a crRNA sequence selected from SEQ ID NOs: 1969-2037. In some embodiments, editing of the IL6ST gene results in a gene that expresses a membrane-bound receptor decoy protein. In some such embodiments, the IL6ST gene is a human IL6ST gene and the guide RNA comprises a crRNA sequence selected from SEQ ID NOs: 2038-2102. In some embodiments, editing of the IL6ST gene results in a gene that expresses a soluble receptor decoy protein. In some such embodiments, the IL6ST gene is a human IL6ST gene and the guide RNA comprises a crRNA sequence selected from SEQ ID NOs: 2103-2176.

### 3. Treatment of Inflammatory Disorders by Targeting an Interleukin-6 Receptor Gene

[0665] In one aspect, methods and pharmaceutical compositions are provided for treating an inflammatory disorder using a CRISPR pharmaceutical composition that targets an interleukin-6 receptor gene. In some embodiments, the CRISPR pharmaceutical composition comprises (i) an RNA-guided nuclease or a nucleic acid encoding an RNA-guided nuclease, and (ii) at least one guide RNA (gRNA), or a nucleic acid encoding at least one gRNA, targeting the interleukin-6 receptor gene, where the gRNA specifically binds a target sequence that is adjacent to a protospacer adjacent motif (PAM) sequence for the RNA-guided nuclease. In some embodiments, the CRISPR pharmaceutical composition comprises (i) an mRNA encoding an RNA-guided nuclease, and (ii) at least one gRNA targeting the interleukin-6 receptor gene. In some embodiments, the mRNA encoding the RNA-guided nuclease and the at least one gRNA are packaged in a lipid nanoparticle (LNP). In some embodiments, the inflammatory disorder is an Inflammatory disease (e.g. cytokine storm in COVID 19 or post-CAR-T therapy), acute local inflammation, inflammatory bowel disease, Crohn's disease, Experimental sepsis, or Castleman's disease.

[0666] In some embodiments, the interleukin-6 receptor gene is an IL6ST gene. In some embodiments, the IL6ST gene is a human IL6ST gene and the guide RNA comprises a crRNA sequence selected from SEQ ID NOs: 1969-2178. In some embodiments, editing of the IL6ST gene results in a knockout of the IL6ST gene. In some such embodiments, the IL6ST gene is a human IL6ST gene and the guide RNA comprises a crRNA sequence selected from SEQ ID NOs: 1969-2037. In some embodiments, editing of the IL6ST gene results in a gene that expresses a membrane-bound receptor decoy protein. In some such embodiments, the IL6ST gene is a human IL6ST gene and the guide RNA comprises a crRNA sequence selected from SEQ ID NOs: 2038-2102. In some embodiments, editing of the IL6ST gene results in a gene that expresses a soluble receptor decoy protein. In some such embodiments, the IL6ST gene is a human IL6ST gene and the guide RNA comprises a crRNA sequence selected from SEQ ID NOs: 2103-2176.

### 4. Treatment of Cardiac Disorder by Targeting an Interleukin-6 Receptor Gene

[0667] In one aspect, methods and pharmaceutical compositions are provided for treating a cardiac disorder using a CRISPR pharmaceutical composition that targets an interleukin-6 receptor gene. In some embodiments, the CRISPR pharmaceutical composition comprises (i) an RNA-guided nuclease or a nucleic acid encoding an RNA-guided nuclease, and (ii) at least one guide RNA (gRNA), or a nucleic acid encoding at least one gRNA, targeting the interleukin-6 receptor gene, where the gRNA specifically binds a target sequence that is adjacent to a protospacer adjacent motif (PAM) sequence for the RNA-guided nuclease. In some embodiments, the CRISPR pharmaceutical composition comprises (i) an mRNA encoding an RNA-guided nuclease, and (ii) at least one gRNA targeting the interleukin-6 receptor gene. In some embodiments, the mRNA encoding the RNA-guided nuclease and the at least one gRNA are packaged in a lipid nanoparticle (LNP). In some embodiments, the cardiac disorder is atherosclerosis, or abdominal aortic aneurism. In some embodiments, a cardiac disorder listed in FIG. 4 is treated with a CRISPR pharmaceutical composition targeting a gene listed as associated with the disorder in FIG. 4. For example, in some embodiments, atherosclerosis is treated with a CRISPR pharmaceutical composition targeting an IL6R or IL6ST gene.

[0668] In some embodiments, the interleukin-6 receptor gene is an IL6ST gene. In some embodiments, the IL6ST gene is a human IL6ST gene and the guide RNA comprises a crRNA sequence selected from SEQ ID NOs: 1969-2178. In some embodiments, editing of the IL6ST gene results in a knockout of the IL6ST gene. In some such embodiments, the IL6ST gene is a human IL6ST gene and the guide RNA comprises a crRNA sequence selected from SEQ ID NOs: 1969-2037. In some embodiments, editing of the IL6ST gene results in a gene that expresses a membrane-bound receptor decoy protein. In some such embodiments, the IL6ST gene is a human IL6ST gene and the guide RNA comprises a crRNA sequence selected from SEQ ID NOs: 2038-2102. In some embodiments, editing of the IL6ST gene results in a gene that expresses a soluble receptor decoy protein. In some such embodiments, the IL6ST gene is a human IL6ST gene and the guide RNA comprises a crRNA sequence selected from SEQ ID NOs: 2103-2176.

### 5. Treatment of Autoimmune Disorder by Targeting an Interleukin-6 Receptor Gene

[0669] In one aspect, methods and pharmaceutical compositions are provided for treating an autoimmune disorder using a CRISPR pharmaceutical composition that targets an interleukin-6 receptor gene. In some embodiments, the CRISPR pharmaceutical composition comprises (i) an RNA-guided nuclease or a nucleic acid encoding an RNA-guided nuclease, and (ii) at least one guide RNA (gRNA), or a nucleic acid encoding at least one gRNA, targeting the interleukin-6 receptor gene, where the gRNA specifically binds a target sequence that is adjacent to a protospacer adjacent motif (PAM) sequence for the RNA-guided nuclease. In some embodiments, the CRISPR pharmaceutical composition comprises (i) an mRNA encoding an RNA-guided nuclease, and (ii) at least one gRNA targeting the interleukin-6 receptor gene. In some embodiments, the mRNA encoding the RNA-guided nuclease and the at least one gRNA are packaged in a lipid nanoparticle (LNP). In some embodiments, the autoimmune disorder is Systemic Lupus Erythematosus. In some embodiments, an autoimmune disorder listed in FIG. 4 is treated with a CRISPR pharmaceutical composition targeting a gene listed as associated with the disorder in FIG. 4. For example, in some embodiments, Systemic Lupus Erythematosus is treated with a CRISPR pharmaceutical composition targeting an IL6R or IL6ST gene.

[0670] In some embodiments, the interleukin-6 receptor gene is an IL6ST gene. In some embodiments, the IL6ST gene is a human IL6ST gene and the guide RNA comprises a crRNA sequence selected from SEQ ID NOs: 1969-2178. In some embodiments, editing of the IL6ST gene results in a knockout of the IL6ST gene. In some such embodiments, the IL6ST gene is a human IL6ST gene and the guide RNA comprises a crRNA sequence selected from SEQ ID NOs: 1969-2037. In some embodiments, editing of the IL6ST gene results in a gene that expresses a membrane-bound receptor decoy protein. In some such embodiments, the IL6ST gene is a human IL6ST gene and the guide RNA comprises a crRNA sequence selected from SEQ ID NOs: 2038-2102. In some embodiments, editing of the IL6ST gene results in a gene that expresses a soluble receptor decoy protein. In some such embodiments, the IL6ST gene is a human IL6ST gene and the guide RNA comprises a crRNA sequence selected from SEQ ID NOs: 2103-2176.

### G. TNFRSF1A

[0671] In some embodiments, the pharmaceutical composition comprising a CRISPR gene-editing system targets TNFRSF1A. In some embodiments, the CRISPR gene-editing system targeting TNFRSF1A is delivered to a mammalian cell via viral vector. In some embodiments, the CRISPR gene-editing system targeting TNFRSF1A is delivered to a mammalian cell via an AAV vector. In some embodiments, the CRISPR gene-editing system targeting TNFRSF1A is delivered to a mammalian cell via a lentiviral vector. In some embodiments, the CRISPR gene-editing system targeting TNFRSF1A is delivered to a mammalian cell via a lipid nanoparticle. In some embodiments, the CRISPR gene-editing system targeting TNFRSF1A is delivered to a mammalian cell via a virus-like particle. In some embodiments, the CRISPR gene-editing system targeting TNFRSF1A is delivered to a mammalian cell via a liposome. In some embodiments, the CRISPR gene-editing system targeting TNFRSF1A is delivered to a mammalian cell via a lipid nanocrystal.

[0672] In various embodiments, the pharmaceutical composition comprising a CRISPR gene-editing system that targets the TNFRSF1A gene is used in a method of treating a mammal in need thereof. In some embodiments, the method treats one or more joint disease or illness or one or more back or spine conditions or disorders. In some embodiments, the method treats one or more musculoskeletal diseases, conditions, and illnesses, including, but not limited to, rheumatoid arthritis, gout, osteoarthritis, osteoporosis, intervertebral disc disease (IVDD), psoriatic arthritis, arthritis, polymyositis, proliferative synovitis, bone neoplasms, sarcoid myopathy, cortex bone disorders, idiopathic scoliosis, tendinopathy, myofibrillar myopathy, enthesis-related arthritis, ankylosing spondylitis, degenerative polyarthritis, arthropathy, osteitis deformans, prolapsed lumbar disc, polymyositis ossificans, idiopathic polymyositis, Luft Disease, adult-onset Still's Disease, osteoarthritis deformans, Bachet's Disease, and combinations thereof. In other embodiments, use of the system treats one or more neoplastic diseases, conditions, and illnesses, including, but not limited to, osteosarcoma, multiple myeloma, lymphoma (e.g., B-cell or cutaneous T-cell lymphoma), leukemia, thyroid carcinoma, glioma, renal cell carcinoma, chondrosarcoma, glioblastoma, melanoma, neuroblastoma, polycystic ovary syndrome, Kaposi sarcoma, squamous cell carcinoma, leiomyosarcoma, malignant peripheral nerve sheath tumor, Ewing's sarcoma, esophageal neoplasms, colon cancer, lung cancer, breast cancer, pancreatic cancer, stomach cancer, epithelial ovarian cancer, cholectoral cancer, liver cancer, skin cancer, prostate cancer, cervical cancer, ovarian cancer, bladder cancer, oral cavity cancer, and combinations thereof. In other embodiments, the method treats one or more inflammatory diseases, conditions, and illnesses, including, but not limited to, autoinflammatory disease (AID), cryopyrin-associated periodic syndrome (CAPS), systemic lupus erythematosus (SLE), inflammatory bowel disease (IBD) and combinations thereof. In some embodiments, the method treats one or more cardiac diseases, conditions, and illnesses, including, but not limited to, myocardial infarction, heart failure (e.g., refractory or acute decompensated heart failure), arrythmias, pericarditis (e.g., refractory idiopathic pericarditis), myocarditis, sepsis-induced cardiomyopathy, atherosclerosis, coronary artery disease and combinations thereof. In some embodiments, the method treats one or more neurological diseases, conditions, and illnesses, including, but not limited to, acute thrombotic stroke, epilepsy, multiple sclerosis, Alzheimer's Disease and combinations thereof. In some embodiments, the method treats one or more ophthalmic diseases, conditions, and illnesses, including, but not limited to, uveitis, scleritis, Sjogren asthenia, dry eye and combinations thereof. In some embodiments, the method treats one or more diseases, conditions, and illnesses, including, but not limited to, chronic kidney disease, Type 2 diabetes, gastroesophageal reflux disease (GERD), non-HP-associated peptic ulcer disease, and pulmonary fibrosis.

[0673] In some embodiments, the pharmaceutical composition comprising a CRISPR gene-editing system targets TNFRSF1A for the treatment of a joint disease or illness. In some embodiments, the pharmaceutical composition comprising a CRISPR gene-editing system targets TNFRSF1A for the treatment of osteoarthritis. In some embodiments, the pharmaceutical composition comprising a CRISPR gene-editing system targets TNFRSF1A for the treatment of gout.

[0674] In some embodiments, the pharmaceutical composition comprising a CRISPR gene-editing system targets TNFRSF1A for the treatment of a musculoskeletal disorder.

[0675] In some embodiments, the pharmaceutical composition comprising a CRISPR gene-editing system targets TNFRSF1A for the treatment of a back or spine condition or disorder. In some embodiments, the pharmaceutical composition comprising a CRISPR gene-editing system targets TNFRSF1A for the treatment of low back pain. In some embodiments, the pharmaceutical composition comprising a CRISPR gene-editing system targets TNFRSF1A for the treatment of degenerative disc disorder. In some embodiments, the pharmaceutical composition comprising a CRISPR gene-editing system targets TNFRSF1A for the treatment of internal disc disruption.

### 1. Treatment of Musculoskeletal Disorders by Targeting a Tumor Necrosis Factor Receptor Superfamily Gene

[0676] In one aspect, methods and pharmaceutical compositions are provided for treating a musculoskeletal disorder using a CRISPR pharmaceutical composition that targets a Tumor Necrosis Factor Receptor Superfamily gene. In some embodiments, the CRISPR pharmaceutical composition comprises (i) an RNA-guided nuclease or a nucleic acid encoding an RNA-guided nuclease, and (ii) at least one guide RNA (gRNA), or a nucleic acid encoding at least one gRNA, targeting the Tumor Necrosis Factor Receptor Superfamily gene, where the gRNA specifically binds a target sequence that is adjacent to a protospacer adjacent motif (PAM) sequence for the RNA-guided nuclease. In some embodiments, the CRISPR pharmaceutical composition comprises (i) an mRNA encoding an RNA-guided nuclease, and (ii) at least one gRNA targeting the Tumor Necrosis Factor Receptor Superfamily gene. In some embodiments, the mRNA encoding the RNA-guided nuclease and the at least one gRNA are packaged in a lipid nanoparticle (LNP). In some embodiments, the musculoskeletal disorder is Arthritis, Infectious Intermittent joint effusion, Ankylosing spondylitis, Arthritis, Osteoarthritis, Spondylarthrites, Plantar fasciitis, Degenerative polyarthritis, Hemophilic arthropathy, Inflammatory myopathy with abundant macrophages, Polymyositis, Tendinosis, Malignant Bone Neoplasm, Osteoporosis, Psoriatic arthritis, Rheumatism, Rheumatoid arthritis, Adult Still's disease, Juvenile arthritis, Early rheumatoid arthritis, Palindromic rheumatism, Gout, Infectious Arthritis, Myotonic dystrophy, Dermatomyositis, Hemophilic arthropathy, Osteopenia, Sjogren's syndrome, Juvenile Idiopathic Arthritis, Myasthenia gravis, Osteolysis, Inflammation, Degenerative polyarthritis, Osteitis deformans, Pigmented villonodular synovitis, or Hyperphosphatasemia with bone disease. In some embodiments, a musculoskeletal disorder listed in FIG. 5, 6, 7, 8, or 9 is treated with a CRISPR pharmaceutical composition targeting a gene listed as associated with the disorder in FIG. 5, 6, 7, 8, or 9. For example, in some embodiments, Rheumatoid Arthritis is treated with a CRISPR pharmaceutical composition targeting a TNFRSF1A, TNFRSF1B, TNFRSF3, TNFRSF4, or TNFRSF11A gene.

[0677] In some embodiments, the tumor necrosis factor receptor superfamily gene is an TNFRSF1A gene. In some embodiments, the TNFRSF1A gene is a human TNFRSF1A gene and the guide RNA comprises a crRNA sequence selected from SEQ ID NOs: 2179-2383. In some embodiments, editing of the TNFRSF1A gene results in a knockout of the TNFRSF1A gene. In some such embodiments, the TNFRSF1A gene is a human TNFRSF1A gene and the guide RNA comprises a crRNA sequence selected from SEQ ID NOs: 2179-2247. In some embodiments, editing of the TNFRSF1A gene results in a gene that expresses a membrane-bound receptor decoy protein. In some such embodiments, the TNFRSF1A gene is a human TNFRSF1A gene and the guide RNA comprises a crRNA sequence selected from SEQ ID NOs: 2248-2369. In some embodiments, editing of the TNFRSF1A gene results in a gene that expresses a soluble receptor decoy protein. In some such embodiments, the TNFRSF1A gene is a human TNFRSF1A gene and the guide RNA comprises a crRNA sequence selected from SEQ ID NOs: 2370-2383.

### 2. Treatment of Neoplasia by Targeting a Tumor Necrosis Factor Receptor Superfamily Gene

[0678] In one aspect, methods and pharmaceutical compositions are provided for treating a neoplasia using a CRISPR pharmaceutical composition that targets a Tumor Necrosis Factor Receptor Superfamily gene. In some embodiments, the CRISPR pharmaceutical composition comprises (i) an RNA-guided nuclease or a nucleic acid encoding an RNA-guided nuclease, and (ii) at least one guide RNA (gRNA), or a nucleic acid encoding at least one gRNA, targeting the Tumor Necrosis Factor Receptor Superfamily gene, where the gRNA specifically binds a target sequence that is adjacent to a protospacer adjacent motif (PAM) sequence for the RNA-guided nuclease. In some embodiments, the CRISPR pharmaceutical composition comprises (i) an mRNA encoding an RNA-guided nuclease, and (ii) at least one gRNA targeting the Tumor Necrosis Factor Receptor Superfamily gene. In some embodiments, the mRNA encoding the RNA-guided nuclease and the at least one gRNA are packaged in a lipid nanoparticle (LNP). In some embodiments, the neoplasia is Neoplasms, Glioblastoma, Astrocytoma, Adenocarcinoma, Osteosarcoma, Squamous cell carcinoma, Metastasis, Ameloblastoma, Cholangiocarcinoma, Choriocarcinoma, Ovarian cancer, Prostate cancer, Lung Cancer, Larynx Cancer, Breast Cancer, Lip and Oral Cavity Carcinoma, Squamous intraepithelial lesion, Neuroblastoma, Non-Hodgkin lymphomas, Malignant Neoplasms, Skin Neoplasms, Neuroblastoma, Neoplasm Metastasis, Colorectal Cancer, Fibrosarcoma, Myeloid Leukemia, Myelofibrosis, Hodgkin Lymphomas, Non-Small Cell Lung Carcinoma, Cervical Cancer, Liver cancer, Extrapulmonary small cell carcinoma, Basal cell carcinoma, Kidney cancer, Pancreatic carcinoma, Mesothelioma, Gastric cancer, Polycystic Ovary Syndrome, Chordoma, Cholangiocarcinoma, Malignant ascites, Nasopharyngeal carcinoma, Head and Neck Carcinoma, Cancer metastasis, Prostate carcinoma, Fibrosarcoma, Liver carcinoma, Carcinoma of bladder, T-Cell Lymphoblastic Leukemia, Bladder Neoplasm, melanoma, Leukemia (such as acute myeloid leukemia), Hepatocellular carcinoma, Colorectal cancer, or Lymphoma (such as Mycosis fungoides and Sézary syndrome). In some embodiments, a neoplasia listed in FIG. 5, 6, 7, 8, or 9 is treated with a CRISPR pharmaceutical composition targeting a gene listed as associated with the disorder in FIG. 5, 6, 7, 8, or 9. For example, in some embodiments, Glioblastoma is treated with a CRISPR pharmaceutical composition targeting a TNFRSF1A, TNFRSF1B, TNFRSF3, TNFRSF4, or TNFRSF11A gene.

[0679] In some embodiments, the tumor necrosis factor receptor superfamily gene is an TNFRSF1A gene. In some embodiments, the TNFRSF1A gene is a human TNFRSF1A gene and the guide RNA comprises a crRNA sequence selected from SEQ ID NOs: 2179-2383. In some embodiments, editing of the TNFRSF1A gene results in a knockout of the TNFRSF1A gene. In some such embodiments, the TNFRSF1A gene is a human TNFRSF1A gene and the guide RNA comprises a crRNA sequence selected from SEQ ID NOs: 2179-2247. In some embodiments, editing of the TNFRSF1A gene results in a gene that expresses a membrane-bound receptor decoy protein. In some such embodiments, the TNFRSF1A gene is a human TNFRSF1A gene and the guide RNA comprises a crRNA sequence selected from SEQ ID NOs: 2248-2369. In some embodiments, editing of the TNFRSF1A gene results in a gene that expresses a soluble receptor decoy protein. In some such embodiments, the TNFRSF1A gene is a human TNFRSF1A gene and the guide RNA comprises a crRNA sequence selected from SEQ ID NOs: 2370-2383.

### 3. Treatment of Autoimmune or Inflammatory Disorders by Targeting a Tumor Necrosis Factor Receptor Superfamily Gene

[0680] In one aspect, methods and pharmaceutical compositions are provided for treating an autoimmune or inflammatory disorder using a CRISPR pharmaceutical composition that targets a Tumor Necrosis Factor Receptor Superfamily gene. In some embodiments, the CRISPR pharmaceutical composition comprises (i) an RNA-guided nuclease or a nucleic acid encoding an RNA-guided nuclease, and (ii) at least one guide RNA (gRNA), or a nucleic acid encoding at least one gRNA, targeting the Tumor Necrosis Factor Receptor Superfamily gene, where the gRNA specifically binds a target sequence that is adjacent to a protospacer adjacent motif (PAM) sequence for the RNA-guided nuclease. In some embodiments, the CRISPR pharmaceutical composition comprises (i) an mRNA encoding an RNA-guided nuclease, and (ii) at least one gRNA targeting the Tumor Necrosis Factor Receptor Superfamily gene. In some embodiments, the mRNA encoding the RNA-guided nuclease and the at least one gRNA are packaged in a lipid nanoparticle (LNP). In some embodiments, the autoimmune or inflammatory disorder is Allergy, Asthma, Multiple sclerosis, Psoriasis, Inflammatory bowel disease, Autoimmune experimental uveitis, Colitis, Hypersensitivity reaction disease, Diabetes, Crohn's disease, Systemic lupus erythematosus, Pulmonary sarcoidosis, Leishmaniasis, Experimental autoimmune encephalomyelitis, HTLV-1-associated myelopathy, Tropical spastic paraparesis, Scleroderma, or Idiopathic inflammatory myopathy (such as polymyositis and dermatomyositis). In some embodiments, an autoimmune or inflammatory disorder listed in FIG. 5, 6, 7, 8, or 9 is treated with a CRISPR pharmaceutical composition targeting a gene listed as associated with the disorder in FIG. 5, 6, 7, 8, or 9. For example, in some embodiments, allergies are treated with a CRISPR pharmaceutical composition targeting a TNFRSF1A, TNFRSF1B, TNFRSF3, TNFRSF4, or TNFRSF11A gene.

[0681] In some embodiments, the tumor necrosis factor receptor superfamily gene is an TNFRSF1A gene. In some embodiments, the TNFRSF1A gene is a human TNFRSF1A gene and the guide RNA comprises a crRNA sequence selected from SEQ ID NOs: 2179-2383. In some embodiments, editing of the TNFRSF1A gene results in a knockout of the TNFRSF1A gene. In some such embodiments, the TNFRSF1A gene is a human TNFRSF1A gene and the guide RNA comprises a crRNA sequence selected from SEQ ID NOs: 2179-2247. In some embodiments, editing of the TNFRSF1A gene results in a gene that expresses a membrane-bound receptor decoy protein. In some such embodiments, the TNFRSF1A gene is a human TNFRSF1A gene and the guide RNA comprises a crRNA sequence selected from SEQ ID NOs: 2248-2369. In some embodiments, editing of the TNFRSF1A gene results in a gene that expresses a soluble receptor decoy protein. In some such embodiments, the TNFRSF1A gene is a human TNFRSF1A gene and the guide RNA comprises a crRNA sequence selected from SEQ ID NOs: 2370-2383.

### H. TNFRSF1B

[0682] In some embodiments, the pharmaceutical composition comprising a CRISPR gene-editing system targets TNFRSF1B. In some embodiments, the CRISPR gene-editing system targeting TNFRSF1B is delivered to a mammalian cell via viral vector. In some embodiments, the CRISPR gene-editing system targeting TNFRSF1B is delivered to a mammalian cell via an AAV vector. In some embodiments, the CRISPR gene-editing system targeting TNFRSF1B is delivered to a mammalian cell via a lentiviral vector. In some embodiments, the CRISPR gene-editing system targeting TNFRSF1B is delivered to a mammalian cell via a lipid nanoparticle. In some embodiments, the CRISPR gene-editing system targeting TNFRSF1B is delivered to a mammalian cell via a virus-like particle. In some embodiments, the CRISPR gene-editing system targeting TNFRSF1B is delivered to a mammalian cell via a liposome. In some embodiments, the CRISPR gene-editing system targeting TNFRSF1B is delivered to a mammalian cell via a lipid nanocrystal.

[0683] In various embodiments, the pharmaceutical composition comprising a CRISPR gene-editing system that targets the TNFRSF1B gene is used in a method of treating a mammal in need thereof. In some embodiments, the method treats one or more joint disease or illness or one or more back or spine conditions or disorders. In some embodiments, the method treats one or more musculoskeletal diseases, conditions, and illnesses, including, but not limited to, rheumatoid arthritis, gout, osteoarthritis, osteoporosis, intervertebral disc disease (IVDD), psoriatic arthritis, arthritis, polymyositis, proliferative synovitis, bone neoplasms, sarcoid myopathy, cortex bone disorders, idiopathic scoliosis, tendinopathy, myofibrillar myopathy, enthesis-related arthritis, ankylosing spondylitis, degenerative polyarthritis, arthropathy, osteitis deformans, prolapsed lumbar disc, polymyositis ossificans, idiopathic polymyositis, Luft Disease, adult-onset Still's Disease, osteoarthritis deformans, Bachet's Disease, and combinations thereof. In other embodiments, use of the system treats one or more neoplastic diseases, conditions, and illnesses, including, but not limited to, osteosarcoma, multiple myeloma, lymphoma (e.g., B-cell or cutaneous T-cell lymphoma), leukemia, thyroid carcinoma, glioma, renal cell carcinoma, chondrosarcoma, glioblastoma, melanoma, neuroblastoma, polycystic ovary syndrome, Kaposi sarcoma, squamous cell carcinoma, leiomyosarcoma, malignant peripheral nerve sheath tumor, Ewing's sarcoma, esophageal neoplasms, colon cancer, lung cancer, breast cancer, pancreatic cancer, stomach cancer, epithelial ovarian cancer, cholectoral cancer, liver cancer, skin cancer, prostate cancer, cervical cancer, ovarian cancer, bladder cancer, oral cavity cancer, and combinations thereof. In other embodiments, the method treats one or more inflammatory diseases, conditions, and illnesses, including, but not limited to, autoinflammatory disease (AID), cryopyrin-associated periodic syndrome (CAPS), systemic lupus erythematosus (SLE), inflammatory bowel disease (IBD) and combinations thereof. In some embodiments, the method treats one or more cardiac diseases, conditions, and illnesses, including, but not limited to, myocardial infarction, heart failure (e.g., refractory or acute decompensated heart failure), arrythmias, pericarditis (e.g., refractory idiopathic pericarditis), myocarditis, sepsis-induced cardiomyopathy, atherosclerosis, coronary artery disease and combinations thereof. In some embodiments, the method treats one or more neurological diseases, conditions, and illnesses, including, but not limited to, acute thrombotic stroke, epilepsy, multiple sclerosis, Alzheimer's Disease and combinations thereof. In some embodiments, the method treats one or more ophthalmic diseases, conditions, and illnesses, including, but not limited to, uveitis, scleritis, Sjogren asthenia, dry eye and combinations thereof. In some embodiments, the method treats one or more diseases, conditions, and illnesses, including, but not limited to, chronic kidney disease, Type 2 diabetes, gastroesophageal reflux disease (GERD), non-HP-associated peptic ulcer disease, and pulmonary fibrosis.

[0684] In some embodiments, the pharmaceutical composition comprising a CRISPR gene-editing system targets TNFRSF1B for the treatment of a joint disease or illness. In some embodiments, the pharmaceutical composition comprising a CRISPR gene-editing system targets TNFRSF1B for the treatment of osteoarthritis. In some embodiments, the pharmaceutical composition comprising a CRISPR gene-editing system targets TNFRSF1B for the treatment of gout.

[0685] In some embodiments, the pharmaceutical composition comprising a CRISPR gene-editing system targets TNFRSF1B for the treatment of a musculoskeletal disorder.

[0686] In some embodiments, the pharmaceutical composition comprising a CRISPR gene-editing system targets TNFRSF1B for the treatment of a back or spine condition or disorder. In some embodiments, the pharmaceutical composition comprising a CRISPR gene-editing system targets TNFRSF1B for the treatment of low back pain. In some embodiments, the pharmaceutical composition comprising a CRISPR gene-editing system targets TNFRSF1B for the treatment of degenerative disc disorder. In some embodiments, the pharmaceutical composition comprising a CRISPR gene-editing system targets TNFRSF1B for the treatment of internal disc disruption.

### 1. Treatment of Musculoskeletal Disorders by Targeting a Tumor Necrosis Factor Receptor Superfamily Gene

[0687] In one aspect, methods and pharmaceutical compositions are provided for treating a musculoskeletal disorder using a CRISPR pharmaceutical composition that targets a Tumor Necrosis Factor Receptor Superfamily gene. In some embodiments, the CRISPR pharmaceutical composition comprises (i) an RNA-guided nuclease or a nucleic acid encoding an RNA-guided nuclease, and (ii) at least one guide RNA (gRNA), or a nucleic acid encoding at least one gRNA, targeting the Tumor Necrosis Factor Receptor Superfamily gene, where the gRNA specifically binds a target sequence that is adjacent to a protospacer adjacent motif (PAM) sequence for the RNA-guided nuclease. In some embodiments, the CRISPR pharmaceutical composition comprises (i) an mRNA encoding an RNA-guided nuclease, and (ii) at least one gRNA targeting the Tumor Necrosis Factor Receptor Superfamily gene. In some embodiments, the mRNA encoding the RNA-guided nuclease and the at least one gRNA are packaged in a lipid nanoparticle (LNP). In some embodiments, the musculoskeletal disorder is Arthritis, Infectious Intermittent joint effusion, Ankylosing spondylitis, Arthritis, Osteoarthritis, Spondylarthrites, Plantar fasciitis, Degenerative polyarthritis, Hemophilic arthropathy, Inflammatory myopathy with abundant macrophages, Polymyositis, Tendinosis, Malignant Bone Neoplasm, Osteoporosis, Psoriatic arthritis, Rheumatism, Rheumatoid arthritis, Adult Still's disease, Juvenile arthritis, Early rheumatoid arthritis, Palindromic rheumatism, Gout, Infectious Arthritis, Myotonic dystrophy, Dermatomyositis, Hemophilic arthropathy, Osteopenia, Sjogren's syndrome, Juvenile Idiopathic Arthritis, Myasthenia gravis, Osteolysis, Inflammation, Degenerative polyarthritis, Osteitis deformans, Pigmented villonodular synovitis, or Hyperphosphatasemia with bone disease. In some embodiments, a musculoskeletal disorder listed in FIG. 5, 6, 7, 8, or 9 is treated with a CRISPR pharmaceutical composition targeting a gene listed as associated with the disorder in FIG. 5, 6, 7, 8, or 9. For example, in some embodiments, Rheumatoid Arthritis is treated with a CRISPR pharmaceutical composition targeting a TNFRSF1A, TNFRSF1B, TNFRSF3, TNFRSF4, or TNFRSF11A gene.

[0688] In some embodiments, the tumor necrosis factor receptor superfamily gene is an TNFRSF1B gene. In some embodiments, the TNFRSF1B gene is a human TNFRSF1B gene and the guide RNA comprises a crRNA sequence selected from SEQ ID NOs: 2396-2642. In some embodiments, editing of the TNFRSF1B gene results in a knockout of the TNFRSF1B gene. In some such embodiments, the TNFRSF1B gene is a human TNFRSF1B gene and the guide RNA comprises a crRNA sequence selected from SEQ ID NOs: 2396-2482. In some embodiments, editing of the TNFRSF1B gene results in a gene that expresses a membrane-bound receptor decoy protein. In some such embodiments, the TNFRSF1B gene is a human TNFRSF1B gene and the guide RNA comprises a crRNA sequence selected from SEQ ID NOs: 2483-2574. In some embodiments, editing of the TNFRSF1B gene results in a gene that expresses a soluble receptor decoy protein. In some such embodiments, the TNFRSF1B gene is a human TNFRSF1B gene and the guide RNA comprises a crRNA sequence selected from SEQ ID NOs: 2575-2622.

### 2. Treatment of Neoplasia by Targeting a Tumor Necrosis Factor Receptor Superfamily Gene

[0689] In one aspect, methods and pharmaceutical compositions are provided for treating a neoplasia using a CRISPR pharmaceutical composition that targets a Tumor Necrosis Factor Receptor Superfamily gene. In some embodiments, the CRISPR pharmaceutical composition comprises (i) an RNA-guided nuclease or a nucleic acid encoding an RNA-guided nuclease, and (ii) at least one guide RNA (gRNA), or a nucleic acid encoding at least one gRNA, targeting the Tumor Necrosis Factor Receptor Superfamily gene, where the gRNA specifically binds a target sequence that is adjacent to a protospacer adjacent motif (PAM) sequence for the RNA-guided nuclease. In some embodiments, the CRISPR pharmaceutical composition comprises (i) an mRNA encoding an RNA-guided nuclease, and (ii) at least one gRNA targeting the Tumor Necrosis Factor Receptor Superfamily gene. In some embodiments, the mRNA encoding the RNA-guided nuclease and the at least one gRNA are packaged in a lipid nanoparticle (LNP). In some embodiments, the neoplasia is Neoplasms, Glioblastoma, Astrocytoma, Adenocarcinoma, Osteosarcoma, Squamous cell carcinoma, Metastasis, Ameloblastoma, Cholangiocarcinoma, Choriocarcinoma, Ovarian cancer, Prostate cancer, Lung Cancer, Larynx Cancer, Breast Cancer, Lip and Oral Cavity Carcinoma, Squamous intraepithelial lesion, Neuroblastoma, Non-Hodgkin lymphomas, Malignant Neoplasms, Skin Neoplasms, Neuroblastoma, Neoplasm Metastasis, Colorectal Cancer, Fibrosarcoma, Myeloid Leukemia, Myelofibrosis, Hodgkin Lymphomas, Non-Small Cell Lung Carcinoma, Cervical Cancer, Liver cancer, Extrapulmonary small cell carcinoma, Basal cell carcinoma, Kidney cancer, Pancreatic carcinoma, Mesothelioma, Gastric cancer, Polycystic Ovary Syndrome, Chordoma, Cholangiocarcinoma, Malignant ascites, Nasopharyngeal carcinoma, Head and Neck Carcinoma, Cancer metastasis, Prostate carcinoma, Fibrosarcoma, Liver carcinoma, Carcinoma of bladder, T-Cell Lymphoblastic Leukemia, Bladder Neoplasm, melanoma, Leukemia (such as acute myeloid leukemia), Hepatocellular carcinoma, Colorectal cancer, or Lymphoma (such as Mycosis fungoides and Sézary syndrome). In some embodiments, a neoplasia listed in FIG. 5, 6, 7, 8, or 9 is treated with a CRISPR pharmaceutical composition targeting a gene listed as associated with the disorder in FIG. 5, 6, 7, 8, or 9. For example, in some embodiments, Glioblastoma is treated with a CRISPR pharmaceutical composition targeting a TNFRSF1A, TNFRSF1B, TNFRSF3, TNFRSF4, or TNFRSF11A gene.

[0690] In some embodiments, the tumor necrosis factor receptor superfamily gene is an TNFRSF1B gene. In some embodiments, the TNFRSF1B gene is a human TNFRSF1B gene and the guide RNA comprises a crRNA sequence selected from SEQ ID NOs: 2396-2642. In some embodiments, editing of the TNFRSF1B gene results in a knockout of the TNFRSF1B gene. In some such embodiments, the TNFRSF1B gene is a human TNFRSF1B gene and the guide RNA comprises a crRNA sequence selected from SEQ ID NOs: 2396-2482. In some embodiments, editing of the TNFRSF1B gene results in a gene that expresses a membrane-bound receptor decoy protein. In some such embodiments, the TNFRSF1B gene is a human TNFRSF1B gene and the guide RNA comprises a crRNA sequence selected from SEQ ID NOs: 2483-2574. In some embodiments, editing of the TNFRSF1B gene results in a gene that expresses a soluble receptor decoy protein. In some such embodiments, the TNFRSF1B gene is a human TNFRSF1B gene and the guide RNA comprises a crRNA sequence selected from SEQ ID NOs: 2575-2622.

### 3. Treatment of Autoimmune or Inflammatory Disorders by Targeting a Tumor Necrosis Factor Receptor Superfamily Gene

[0691] In one aspect, methods and pharmaceutical compositions are provided for treating an autoimmune or inflammatory disorder using a CRISPR pharmaceutical composition that targets a Tumor Necrosis Factor Receptor Superfamily gene. In some embodiments, the CRISPR pharmaceutical composition comprises (i) an RNA-guided nuclease or a nucleic acid encoding an RNA-guided nuclease, and (ii) at least one guide RNA (gRNA), or a nucleic acid encoding at least one gRNA, targeting the Tumor Necrosis Factor Receptor Superfamily gene, where the gRNA specifically binds a target sequence that is adjacent to a protospacer adjacent motif (PAM) sequence for the RNA-guided nuclease. In some embodiments, the CRISPR pharmaceutical composition comprises (i) an mRNA encoding an RNA-guided nuclease, and (ii) at least one gRNA targeting the Tumor Necrosis Factor Receptor Superfamily gene. In some embodiments, the mRNA encoding the RNA-guided nuclease and the at least one gRNA are packaged in a lipid nanoparticle (LNP). In some embodiments, the autoimmune or inflammatory disorder is Allergy, Asthma, Multiple sclerosis, Psoriasis, Inflammatory bowel disease, Autoimmune experimental uveitis, Colitis, Hypersensitivity reaction disease, Diabetes, Crohn's disease, Systemic lupus erythematosus, Pulmonary sarcoidosis, Leishmaniasis, Experimental autoimmune encephalomyelitis, HTLV-1-associated myelopathy, Tropical spastic paraparesis, Scleroderma, or Idiopathic inflammatory myopathy (such as polymyositis and dermatomyositis). In some embodiments, an autoimmune or inflammatory disorder listed in FIG. 5, 6, 7, 8, or 9 is treated with a CRISPR pharmaceutical composition targeting a gene listed as associated with the disorder in FIG. 5, 6, 7, 8, or 9. For example, in some embodiments, allergies are treated with a CRISPR pharmaceutical composition targeting a TNFRSF1A, TNFRSF1B, TNFRSF3, TNFRSF4, or TNFRSF11A gene.

[0692] In some embodiments, the tumor necrosis factor receptor superfamily gene is an TNFRSF1B gene. In some embodiments, the TNFRSF1B gene is a human TNFRSF1B gene and the guide RNA comprises a crRNA sequence selected from SEQ ID NOs: 2396-2642. In some embodiments, editing of the TNFRSF1B gene results in a knockout of the TNFRSF1B gene. In some such embodiments, the TNFRSF1B gene is a human TNFRSF1B gene and the guide RNA comprises a crRNA sequence selected from SEQ ID NOs: 2396-2482. In some embodiments, editing of the TNFRSF1B gene results in a gene that expresses a membrane-bound receptor decoy protein. In some such embodiments, the TNFRSF1B gene is a human TNFRSF1B gene and the guide RNA comprises a crRNA sequence selected from SEQ ID NOs: 2483-2574. In some embodiments, editing of the TNFRSF1B gene results in a gene that expresses a soluble receptor decoy protein. In some such embodiments, the TNFRSF1B gene is a human TNFRSF1B gene and the guide RNA comprises a crRNA sequence selected from SEQ ID NOs: 2575-2622.

### I. TNFRSF3

[0693] In some embodiments, the pharmaceutical composition comprising a CRISPR gene-editing system targets TNFRSF3. In some embodiments, the CRISPR gene-editing system targeting TNFRSF3 is delivered to a mammalian cell via viral vector. In some embodiments, the CRISPR gene-editing system targeting TNFRSF3 is delivered to a mammalian cell via an AAV vector. In some embodiments, the CRISPR gene-editing system targeting TNFRSF3 is delivered to a mammalian cell via a lentiviral vector. In some embodiments, the CRISPR gene-editing system targeting TNFRSF3 is delivered to a mammalian cell via a lipid nanoparticle. In some embodiments, the CRISPR gene-editing system targeting TNFRSF3 is delivered to a mammalian cell via a virus-like particle. In some embodiments, the CRISPR gene-editing system targeting TNFRSF3 is delivered to a mammalian cell via a liposome. In some embodiments, the CRISPR gene-editing system targeting TNFRSF3 is delivered to a mammalian cell via a lipid nanocrystal.

[0694] In various embodiments, the pharmaceutical composition comprising a CRISPR gene-editing system that targets the TNFRSF3 gene is used in a method of treating a mammal in need thereof. In some embodiments, the method treats one or more joint disease or illness or one or more back or spine conditions or disorders. In some embodiments, the method treats one or more musculoskeletal diseases, conditions, and illnesses, including, but not limited to, rheumatoid arthritis, gout, osteoarthritis, osteoporosis, intervertebral disc disease (IVDD), psoriatic arthritis, arthritis, polymyositis, proliferative synovitis, bone neoplasms, sarcoid myopathy, cortex bone disorders, idiopathic scoliosis, tendinopathy, myofibrillar myopathy, enthesis-related arthritis, ankylosing spondylitis, degenerative polyarthritis, arthropathy, osteitis deformans, prolapsed lumbar disc, polymyositis ossificans, idiopathic polymyositis, Luft Disease, adult-onset Still's Disease, osteoarthritis deformans, Bachet's Disease, and combinations thereof. In other embodiments, use of the system treats one or more neoplastic diseases, conditions, and illnesses, including, but not limited to, osteosarcoma, multiple myeloma, lymphoma (e.g., B-cell or cutaneous T-cell lymphoma), leukemia, thyroid carcinoma, glioma, renal cell carcinoma, chondrosarcoma, glioblastoma, melanoma, neuroblastoma, polycystic ovary syndrome, Kaposi sarcoma, squamous cell carcinoma, leiomyosarcoma, malignant peripheral nerve sheath tumor, Ewing's sarcoma, esophageal neoplasms, colon cancer, lung cancer, breast cancer, pancreatic cancer, stomach cancer, epithelial ovarian cancer, cholectoral cancer, liver cancer, skin cancer, prostate cancer, cervical cancer, ovarian cancer, bladder cancer, oral cavity cancer, and combinations thereof. In other embodiments, the method treats one or more inflammatory diseases, conditions, and illnesses, including, but not limited to, autoinflammatory disease (AID), cryopyrin-associated periodic syndrome (CAPS), systemic lupus erythematosus (SLE), inflammatory bowel disease (IBD) and combinations thereof. In some embodiments, the method treats one or more cardiac diseases, conditions, and illnesses, including, but not limited to, myocardial infarction, heart failure (e.g., refractory or acute decompensated heart failure), arrythmias, pericarditis (e.g., refractory idiopathic pericarditis), myocarditis, sepsis-induced cardiomyopathy, atherosclerosis, coronary artery disease and combinations thereof. In some embodiments, the method treats one or more neurological diseases, conditions, and illnesses, including, but not limited to, acute thrombotic stroke, epilepsy, multiple sclerosis, Alzheimer's Disease and combinations thereof. In some embodiments, the method treats one or more ophthalmic diseases, conditions, and illnesses, including, but not limited to, uveitis, scleritis, Sjogren asthenia, dry eye and combinations thereof. In some embodiments, the method treats one or more diseases, conditions, and illnesses, including, but not limited to, chronic kidney disease, Type 2 diabetes, gastroesophageal reflux disease (GERD), non-HP-associated peptic ulcer disease, and pulmonary fibrosis.

[0695] In some embodiments, the pharmaceutical composition comprising a CRISPR gene-editing system targets TNFRSF3 for the treatment of a joint disease or illness. In some embodiments, the pharmaceutical composition comprising a CRISPR gene-editing system targets TNFRSF3 for the treatment of osteoarthritis. In some embodiments, the pharmaceutical composition comprising a CRISPR gene-editing system targets TNFRSF3 for the treatment of gout.

[0696] In some embodiments, the pharmaceutical composition comprising a CRISPR gene-editing system targets TNFRSF3 for the treatment of a musculoskeletal disorder.

[0697] In some embodiments, the pharmaceutical composition comprising a CRISPR gene-editing system targets TNFRSF3 for the treatment of a back or spine condition or disorder. In some embodiments, the pharmaceutical composition comprising a CRISPR gene-editing system targets TNFRSF3 for the treatment of low back pain. In some embodiments, the pharmaceutical composition comprising a CRISPR gene-editing system targets TNFRSF3 for the treatment of degenerative disc disorder. In some embodiments, the pharmaceutical composition comprising a CRISPR gene-editing system targets TNFRSF3 for the treatment of internal disc disruption.

### 1. Treatment of Musculoskeletal Disorders by Targeting a Tumor Necrosis Factor Receptor Superfamily Gene

[0698] In one aspect, methods and pharmaceutical compositions are provided for treating a musculoskeletal disorder using a CRISPR pharmaceutical composition that targets a Tumor Necrosis Factor Receptor Superfamily gene. In some embodiments, the CRISPR pharmaceutical composition comprises (i) an RNA-guided nuclease or a nucleic acid encoding an RNA-guided nuclease, and (ii) at least one guide RNA (gRNA), or a nucleic acid encoding at least one gRNA, targeting the Tumor Necrosis Factor Receptor Superfamily gene, where the gRNA specifically binds a target sequence that is adjacent to a protospacer adjacent motif (PAM) sequence for the RNA-guided nuclease. In some embodiments, the CRISPR pharmaceutical composition comprises (i) an mRNA encoding an RNA-guided nuclease, and (ii) at least one gRNA targeting the Tumor Necrosis Factor Receptor Superfamily gene. In some embodiments, the mRNA encoding the RNA-guided nuclease and the at least one gRNA are packaged in a lipid nanoparticle (LNP). In some embodiments, the musculoskeletal disorder is Arthritis, Infectious Intermittent joint effusion, Ankylosing spondylitis, Arthritis, Osteoarthritis, Spondylarthrites, Plantar fasciitis, Degenerative polyarthritis, Hemophilic arthropathy, Inflammatory myopathy with abundant macrophages, Polymyositis, Tendinosis, Malignant Bone Neoplasm, Osteoporosis, Psoriatic arthritis, Rheumatism, Rheumatoid arthritis, Adult Still's disease, Juvenile arthritis, Early rheumatoid arthritis, Palindromic rheumatism, Gout, Infectious Arthritis, Myotonic dystrophy, Dermatomyositis, Hemophilic arthropathy, Osteopenia, Sjogren's syndrome, Juvenile Idiopathic Arthritis, Myasthenia gravis, Osteolysis, Inflammation, Degenerative polyarthritis, Osteitis deformans, Pigmented villonodular synovitis, or Hyperphosphatasemia with bone disease. In some embodiments, a musculoskeletal disorder listed in FIG. 5, 6, 7, 8, or 9 is treated with a CRISPR pharmaceutical composition targeting a gene listed as associated with the disorder in FIG. 5, 6, 7, 8, or 9. For example, in some embodiments, Rheumatoid Arthritis is treated with a CRISPR pharmaceutical composition targeting a TNFRSF1A, TNFRSF1B, TNFRSF3, TNFRSF4, or TNFRSF11A gene.

[0699] In some embodiments, the tumor necrosis factor receptor superfamily gene is an TNFRSF3 gene. In some embodiments, the TNFRSF3 gene is a human TNFRSF3 gene and the guide RNA comprises a crRNA sequence selected from SEQ ID NOs: 2643-2866. In some embodiments, editing of the TNFRSF3 gene results in a knockout of the TNFRSF3 gene. In some such embodiments, the TNFRSF3 gene is a human TNFRSF3 gene and the guide RNA comprises a crRNA sequence selected from SEQ ID NOs: 2643-2737. In some embodiments, editing of the TNFRSF3 gene results in a gene that expresses a membrane-bound receptor decoy protein. In some such embodiments, the TNFRSF3 gene is a human TNFRSF3 gene and the guide RNA comprises a crRNA sequence selected from SEQ ID NOs: 2738-2846. In some embodiments, editing of the TNFRSF3 gene results in a gene that expresses a soluble receptor decoy protein. In some such embodiments, the TNFRSF3 gene is a human TNFRSF3 gene and the guide RNA comprises a crRNA sequence selected from SEQ ID NOs: 2847-2852.

### 2. Treatment of Neoplasia by Targeting a Tumor Necrosis Factor Receptor Superfamily Gene

[0700] In one aspect, methods and pharmaceutical compositions are provided for treating a neoplasia using a CRISPR pharmaceutical composition that targets a Tumor Necrosis Factor Receptor Superfamily gene. In some embodiments, the CRISPR pharmaceutical composition comprises (i) an RNA-guided nuclease or a nucleic acid encoding an RNA-guided nuclease, and (ii) at least one guide RNA (gRNA), or a nucleic acid encoding at least one gRNA, targeting the Tumor Necrosis Factor Receptor Superfamily gene, where the gRNA specifically binds a target sequence that is adjacent to a protospacer adjacent motif (PAM) sequence for the RNA-guided nuclease. In some embodiments, the CRISPR pharmaceutical composition comprises (i) an mRNA encoding an RNA-guided nuclease, and (ii) at least one gRNA targeting the Tumor Necrosis Factor Receptor Superfamily gene. In some embodiments, the mRNA encoding the RNA-guided nuclease and the at least one gRNA are packaged in a lipid nanoparticle (LNP). In some embodiments, the neoplasia is Neoplasms, Glioblastoma, Astrocytoma, Adenocarcinoma, Osteosarcoma, Squamous cell carcinoma, Metastasis, Ameloblastoma, Cholangiocarcinoma, Choriocarcinoma, Ovarian cancer, Prostate cancer, Lung Cancer, Larynx Cancer, Breast Cancer, Lip and Oral Cavity Carcinoma, Squamous intraepithelial lesion, Neuroblastoma, Non-Hodgkin lymphomas, Malignant Neoplasms, Skin Neoplasms, Neuroblastoma, Neoplasm Metastasis, Colorectal Cancer, Fibrosarcoma, Myeloid Leukemia, Myelofibrosis, Hodgkin Lymphomas, Non-Small Cell Lung Carcinoma, Cervical Cancer, Liver cancer, Extrapulmonary small cell carcinoma, Basal cell carcinoma, Kidney cancer, Pancreatic carcinoma, Mesothelioma, Gastric cancer, Polycystic Ovary Syndrome, Chordoma, Cholangiocarcinoma, Malignant ascites, Nasopharyngeal carcinoma, Head and Neck Carcinoma, Cancer metastasis, Prostate carcinoma, Fibrosarcoma, Liver carcinoma, Carcinoma of bladder, T-Cell Lymphoblastic Leukemia, Bladder Neoplasm, melanoma, Leukemia (such as acute myeloid leukemia), Hepatocellular carcinoma, Colorectal cancer, or Lymphoma (such as Mycosis fungoides and Sézary syndrome). In some embodiments, a neoplasia listed in FIG. 5, 6, 7, 8, or 9 is treated with a CRISPR pharmaceutical composition targeting a gene listed as associated with the disorder in FIG. 5, 6, 7, 8, or 9. For example, in some embodiments, Glioblastoma is treated with a CRISPR pharmaceutical composition targeting a TNFRSF1A, TNFRSF1B, TNFRSF3, TNFRSF4, or TNFRSF11A gene.

[0701] In some embodiments, the tumor necrosis factor receptor superfamily gene is an TNFRSF3 gene. In some embodiments, the TNFRSF3 gene is a human TNFRSF3 gene and the guide RNA comprises a crRNA sequence selected from SEQ ID NOs: 2643-2866. In some embodiments, editing of the TNFRSF3 gene results in a knockout of the TNFRSF3 gene. In some such embodiments, the TNFRSF3 gene is a human TNFRSF3 gene and the guide RNA comprises a crRNA sequence selected from SEQ ID NOs: 2643-2737. In some embodiments, editing of the TNFRSF3 gene results in a gene that expresses a membrane-bound receptor decoy protein. In some such embodiments, the TNFRSF3 gene is a human TNFRSF3 gene and the guide RNA comprises a crRNA sequence selected from SEQ ID NOs: 2738-2846. In some embodiments, editing of the TNFRSF3 gene results in a gene that expresses a soluble receptor decoy protein. In some such embodiments, the TNFRSF3 gene is a human TNFRSF3 gene and the guide RNA comprises a crRNA sequence selected from SEQ ID NOs: 2847-2852.

### 3. Treatment of Autoimmune or Inflammatory Disorders by Targeting a Tumor Necrosis Factor Receptor Superfamily Gene

[0702] In one aspect, methods and pharmaceutical compositions are provided for treating an autoimmune or inflammatory disorder using a CRISPR pharmaceutical composition that targets a Tumor Necrosis Factor Receptor Superfamily gene. In some embodiments, the CRISPR pharmaceutical composition comprises (i) an RNA-guided nuclease or a nucleic acid encoding an RNA-guided nuclease, and (ii) at least one guide RNA (gRNA), or a nucleic acid encoding at least one gRNA, targeting the Tumor Necrosis Factor Receptor Superfamily gene, where the gRNA specifically binds a target sequence that is adjacent to a protospacer adjacent motif (PAM) sequence for the RNA-guided nuclease. In some embodiments, the CRISPR pharmaceutical composition comprises (i) an mRNA encoding an RNA-guided nuclease, and (ii) at least one gRNA targeting the Tumor Necrosis Factor Receptor Superfamily gene. In some embodiments, the mRNA encoding the RNA-guided nuclease and the at least one gRNA are packaged in a lipid nanoparticle (LNP). In some embodiments, the autoimmune or inflammatory disorder is Allergy, Asthma, Multiple sclerosis, Psoriasis, Inflammatory bowel disease, Autoimmune experimental uveitis, Colitis, Hypersensitivity reaction disease, Diabetes, Crohn's disease, Systemic lupus erythematosus, Pulmonary sarcoidosis, Leishmaniasis, Experimental autoimmune encephalomyelitis, HTLV-1-associated myelopathy, Tropical spastic paraparesis, Scleroderma, or Idiopathic inflammatory myopathy (such as polymyositis and dermatomyositis). In some embodiments, an autoimmune or inflammatory disorder listed in FIG. 5, 6, 7, 8, or 9 is treated with a CRISPR pharmaceutical composition targeting a gene listed as associated with the disorder in FIG. 5, 6, 7, 8, or 9. For example, in some embodiments, allergies are treated with a CRISPR pharmaceutical composition targeting a TNFRSF1A, TNFRSF1B, TNFRSF3, TNFRSF4, or TNFRSF11A gene.

[0703] In some embodiments, the tumor necrosis factor receptor superfamily gene is an TNFRSF3 gene. In some embodiments, the TNFRSF3 gene is a human TNFRSF3 gene and the guide RNA comprises a crRNA sequence selected from SEQ ID NOs: 2643-2866. In some embodiments, editing of the TNFRSF3 gene results in a knockout of the TNFRSF3 gene. In some such embodiments, the TNFRSF3 gene is a human TNFRSF3 gene and the guide RNA comprises a crRNA sequence selected from SEQ ID NOs: 2643-2737. In some embodiments, editing of the TNFRSF3 gene results in a gene that expresses a membrane-bound receptor decoy protein. In some such embodiments, the TNFRSF3 gene is a human TNFRSF3 gene and the guide RNA comprises a crRNA sequence selected from SEQ ID NOs: 2738-2846. In some embodiments, editing of the TNFRSF3 gene results in a gene that expresses a soluble receptor decoy protein. In some such embodiments, the TNFRSF3 gene is a human TNFRSF3 gene and the guide RNA comprises a crRNA sequence selected from SEQ ID NOs: 2847-2852.

### J. TNFRSF4

[0704] In some embodiments, the pharmaceutical composition comprising a CRISPR gene-editing system targets TNFRSF4. In some embodiments, the CRISPR gene-editing system targeting TNFRSF4 is delivered to a mammalian cell via viral vector. In some embodiments, the CRISPR gene-editing system targeting TNFRSF4 is delivered to a mammalian cell via an AAV vector. In some embodiments, the CRISPR gene-editing system targeting TNFRSF4 is delivered to a mammalian cell via a lentiviral vector. In some embodiments, the CRISPR gene-editing system targeting TNFRSF4 is delivered to a mammalian cell via a lipid nanoparticle. In some embodiments, the CRISPR gene-editing system targeting TNFRSF4 is delivered to a mammalian cell via a virus-like particle. In some embodiments, the CRISPR gene-editing system targeting TNFRSF4 is delivered to a mammalian cell via a liposome. In some embodiments, the CRISPR gene-editing system targeting TNFRSF4 is delivered to a mammalian cell via a lipid nanocrystal.

[0705] In various embodiments, the pharmaceutical composition comprising a CRISPR gene-editing system that targets the TNFRSF4 gene is used in a method of treating a mammal in need thereof. In some embodiments, the method treats one or more joint disease or illness or one or more back or spine conditions or disorders. In some embodiments, the method treats one or more musculoskeletal diseases, conditions, and illnesses, including, but not limited to, rheumatoid arthritis, gout, osteoarthritis, osteoporosis, intervertebral disc disease (IVDD), psoriatic arthritis, arthritis, polymyositis, proliferative synovitis, bone neoplasms, sarcoid myopathy, cortex bone disorders, idiopathic scoliosis, tendinopathy, myofibrillar myopathy, enthesis-related arthritis, ankylosing spondylitis, degenerative polyarthritis, arthropathy, osteitis deformans, prolapsed lumbar disc, polymyositis ossificans, idiopathic polymyositis, Luft Disease, adult-onset Still's Disease, osteoarthritis deformans, Bachet's Disease, and combinations thereof. In other embodiments, use of the system treats one or more neoplastic diseases, conditions, and illnesses, including, but not limited to, osteosarcoma, multiple myeloma, lymphoma (e.g., B-cell or cutaneous T-cell lymphoma), leukemia, thyroid carcinoma, glioma, renal cell carcinoma, chondrosarcoma, glioblastoma, melanoma, neuroblastoma, polycystic ovary syndrome, Kaposi sarcoma, squamous cell carcinoma, leiomyosarcoma, malignant peripheral nerve sheath tumor, Ewing's sarcoma, esophageal neoplasms, colon cancer, lung cancer, breast cancer, pancreatic cancer, stomach cancer, epithelial ovarian cancer, cholectoral cancer, liver cancer, skin cancer, prostate cancer, cervical cancer, ovarian cancer, bladder cancer, oral cavity cancer, and combinations thereof. In other embodiments, the method treats one or more inflammatory diseases, conditions, and illnesses, including, but not limited to, autoinflammatory disease (AID), cryopyrin-associated periodic syndrome (CAPS), systemic lupus erythematosus (SLE), inflammatory bowel disease (IBD) and combinations thereof. In some embodiments, the method treats one or more cardiac diseases, conditions, and illnesses, including, but not limited to, myocardial infarction, heart failure (e.g., refractory or acute decompensated heart failure), arrythmias, pericarditis (e.g., refractory idiopathic pericarditis), myocarditis, sepsis-induced cardiomyopathy, atherosclerosis, coronary artery disease and combinations thereof. In some embodiments, the method treats one or more neurological diseases, conditions, and illnesses, including, but not limited to, acute thrombotic stroke, epilepsy, multiple sclerosis, Alzheimer's Disease and combinations thereof. In some embodiments, the method treats one or more ophthalmic diseases, conditions, and illnesses, including, but not limited to, uveitis, scleritis, Sjogren asthenia, dry eye and combinations thereof. In some embodiments, the method treats one or more diseases, conditions, and illnesses, including, but not limited to, chronic kidney disease, Type 2 diabetes, gastroesophageal reflux disease (GERD), non-HP-associated peptic ulcer disease, and pulmonary fibrosis.

[0706] In some embodiments, the pharmaceutical composition comprising a CRISPR gene-editing system targets TNFRSF4 for the treatment of a joint disease or illness. In some embodiments, the pharmaceutical composition comprising a CRISPR gene-editing system targets TNFRSF4 for the treatment of osteoarthritis. In some embodiments, the pharmaceutical composition comprising a CRISPR gene-editing system targets TNFRSF4 for the treatment of gout.

[0707] In some embodiments, the pharmaceutical composition comprising a CRISPR gene-editing system targets TNFRSF4 for the treatment of a musculoskeletal disorder.

[0708] In some embodiments, the pharmaceutical composition comprising a CRISPR gene-editing system targets TNFRSF4 for the treatment of a back or spine condition or disorder. In some embodiments, the pharmaceutical composition comprising a CRISPR gene-editing system targets TNFRSF4 for the treatment of low back pain. In some embodiments, the pharmaceutical composition comprising a CRISPR gene-editing system targets TNFRSF4 for the treatment of degenerative disc disorder. In some embodiments, the pharmaceutical composition comprising a CRISPR gene-editing system targets TNFRSF4 for the treatment of internal disc disruption.

### 1. Treatment of Musculoskeletal Disorders by Targeting a Tumor Necrosis Factor Receptor Superfamily Gene

[0709] In one aspect, methods and pharmaceutical compositions are provided for treating a musculoskeletal disorder using a CRISPR pharmaceutical composition that targets a Tumor Necrosis Factor Receptor Superfamily gene. In some embodiments, the CRISPR pharmaceutical composition comprises (i) an RNA-guided nuclease or a nucleic acid encoding an RNA-guided nuclease, and (ii) at least one guide RNA (gRNA), or a nucleic acid encoding at least one gRNA, targeting the Tumor Necrosis Factor Receptor Superfamily gene, where the gRNA specifically binds a target sequence that is adjacent to a protospacer adjacent motif (PAM) sequence for the RNA-guided nuclease. In some embodiments, the CRISPR pharmaceutical composition comprises (i) an mRNA encoding an RNA-guided nuclease, and (ii) at least one gRNA targeting the Tumor Necrosis Factor Receptor Superfamily gene. In some embodiments, the mRNA encoding the RNA-guided nuclease and the at least one gRNA are packaged in a lipid nanoparticle (LNP). In some embodiments, the musculoskeletal disorder is Arthritis, Infectious Intermittent joint effusion, Ankylosing spondylitis, Arthritis, Osteoarthritis, Spondylarthrites, Plantar fasciitis, Degenerative polyarthritis, Hemophilic arthropathy, Inflammatory myopathy with abundant macrophages, Polymyositis, Tendinosis, Malignant Bone Neoplasm, Osteoporosis, Psoriatic arthritis, Rheumatism, Rheumatoid arthritis, Adult Still's disease, Juvenile arthritis, Early rheumatoid arthritis, Palindromic rheumatism, Gout, Infectious Arthritis, Myotonic dystrophy, Dermatomyositis, Hemophilic arthropathy, Osteopenia, Sjogren's syndrome, Juvenile Idiopathic Arthritis, Myasthenia gravis, Osteolysis, Inflammation, Degenerative polyarthritis, Osteitis deformans, Pigmented villonodular synovitis, or Hyperphosphatasemia with bone disease. In some embodiments, a musculoskeletal disorder listed in FIG. 5, 6, 7, 8, or 9 is treated with a CRISPR pharmaceutical composition targeting a gene listed as associated with the disorder in FIG. 5, 6, 7, 8, or 9. For example, in some embodiments, Rheumatoid Arthritis is treated with a CRISPR pharmaceutical composition targeting a TNFRSF1A, TNFRSF1B, TNFRSF3, TNFRSF4, or TNFRSF11A gene.

[0710] In some embodiments, the tumor necrosis factor receptor superfamily gene is an TNFRSF4 gene. In some embodiments, the TNFRSF4 gene is a human TNFRSF4 gene and the guide RNA comprises a crRNA sequence selected from SEQ ID NOs: 2867-3041. In some embodiments, editing of the TNFRSF4 gene results in a knockout of the TNFRSF4 gene. In some such embodiments, the TNFRSF4 gene is a human TNFRSF4 gene and the guide RNA comprises a crRNA sequence selected from SEQ ID NOs: 2867-2950. In some embodiments, editing of the TNFRSF4 gene results in a gene that expresses a membrane-bound receptor decoy protein. In some such embodiments, the TNFRSF4 gene is a human TNFRSF4 gene and the guide RNA comprises a crRNA sequence selected from SEQ ID NOs: 2951-2981. In some embodiments, editing of the TNFRSF4 gene results in a gene that expresses a soluble receptor decoy protein. In some such embodiments, the TNFRSF4 gene is a human TNFRSF4 gene and the guide RNA comprises a crRNA sequence selected from SEQ ID NOs: 2982-3035.

### 2. Treatment of Neoplasia by Targeting a Tumor Necrosis Factor Receptor Superfamily Gene

[0711] In one aspect, methods and pharmaceutical compositions are provided for treating a neoplasia using a CRISPR pharmaceutical composition that targets a Tumor Necrosis Factor Receptor Superfamily gene. In some embodiments, the CRISPR pharmaceutical composition comprises (i) an RNA-guided nuclease or a nucleic acid encoding an RNA-guided nuclease, and (ii) at least one guide RNA (gRNA), or a nucleic acid encoding at least one gRNA, targeting the Tumor Necrosis Factor Receptor Superfamily gene, where the gRNA specifically binds a target sequence that is adjacent to a protospacer adjacent motif (PAM) sequence for the RNA-guided nuclease. In some embodiments, the CRISPR pharmaceutical composition comprises (i) an mRNA encoding an RNA-guided nuclease, and (ii) at least one gRNA targeting the Tumor Necrosis Factor Receptor Superfamily gene. In some embodiments, the mRNA encoding the RNA-guided nuclease and the at least one gRNA are packaged in a lipid nanoparticle (LNP). In some embodiments, the neoplasia is Neoplasms, Glioblastoma, Astrocytoma, Adenocarcinoma, Osteosarcoma, Squamous cell carcinoma, Metastasis, Ameloblastoma, Cholangiocarcinoma, Choriocarcinoma, Ovarian cancer, Prostate cancer, Lung Cancer, Larynx Cancer, Breast Cancer, Lip and Oral Cavity Carcinoma, Squamous intraepithelial lesion, Neuroblastoma, Non-Hodgkin lymphomas, Malignant Neoplasms, Skin Neoplasms, Neuroblastoma, Neoplasm Metastasis, Colorectal Cancer, Fibrosarcoma, Myeloid Leukemia, Myelofibrosis, Hodgkin Lymphomas, Non-Small Cell Lung Carcinoma, Cervical Cancer, Liver cancer, Extrapulmonary small cell carcinoma, Basal cell carcinoma, Kidney cancer, Pancreatic carcinoma, Mesothelioma, Gastric cancer, Polycystic Ovary Syndrome, Chordoma, Cholangiocarcinoma, Malignant ascites, Nasopharyngeal carcinoma, Head and Neck Carcinoma, Cancer metastasis, Prostate carcinoma, Fibrosarcoma, Liver carcinoma, Carcinoma of bladder, T-Cell Lymphoblastic Leukemia, Bladder Neoplasm, melanoma, Leukemia (such as acute myeloid leukemia), Hepatocellular carcinoma, Colorectal cancer, or Lymphoma (such as Mycosis fungoides and Sézary syndrome). In some embodiments, a neoplasia listed in FIG. 5, 6, 7, 8, or 9 is treated with a CRISPR pharmaceutical composition targeting a gene listed as associated with the disorder in FIG. 5, 6, 7, 8, or 9. For example, in some embodiments, Glioblastoma is treated with a CRISPR pharmaceutical composition targeting a TNFRSF1A, TNFRSF1B, TNFRSF3, TNFRSF4, or TNFRSF11A gene.

[0712] In some embodiments, the tumor necrosis factor receptor superfamily gene is an TNFRSF4 gene. In some embodiments, the TNFRSF4 gene is a human TNFRSF4 gene and the guide RNA comprises a crRNA sequence selected from SEQ ID NOs: 2867-3041. In some embodiments, editing of the TNFRSF4 gene results in a knockout of the TNFRSF4 gene. In some such embodiments, the TNFRSF4 gene is a human TNFRSF4 gene and the guide RNA comprises a crRNA sequence selected from SEQ ID NOs: 2867-2950. In some embodiments, editing of the TNFRSF4 gene results in a gene that expresses a membrane-bound receptor decoy protein. In some such embodiments, the TNFRSF4 gene is a human TNFRSF4 gene and the guide RNA comprises a crRNA sequence selected from SEQ ID NOs: 2951-2981. In some embodiments, editing of the TNFRSF4 gene results in a gene that expresses a soluble receptor decoy protein. In some such embodiments, the TNFRSF4 gene is a human TNFRSF4 gene and the guide RNA comprises a crRNA sequence selected from SEQ ID NOs: 2982-3035.

### 3. Treatment of Autoimmune or Inflammatory Disorders by Targeting a Tumor Necrosis Factor Receptor Superfamily Gene

[0713] In one aspect, methods and pharmaceutical compositions are provided for treating an autoimmune or inflammatory disorder using a CRISPR pharmaceutical composition that targets a Tumor Necrosis Factor Receptor Superfamily gene. In some embodiments, the CRISPR pharmaceutical composition comprises (i) an RNA-guided nuclease or a nucleic acid encoding an RNA-guided nuclease, and (ii) at least one guide RNA (gRNA), or a nucleic acid encoding at least one gRNA, targeting the Tumor Necrosis Factor Receptor Superfamily gene, where the gRNA specifically binds a target sequence that is adjacent to a protospacer adjacent motif (PAM) sequence for the RNA-guided nuclease. In some embodiments, the CRISPR pharmaceutical composition comprises (i) an mRNA encoding an RNA-guided nuclease, and (ii) at least one gRNA targeting the Tumor Necrosis Factor Receptor Superfamily gene. In some embodiments, the mRNA encoding the RNA-guided nuclease and the at least one gRNA are packaged in a lipid nanoparticle (LNP). In some embodiments, the autoimmune or inflammatory disorder is Allergy, Asthma, Multiple sclerosis, Psoriasis, Inflammatory bowel disease, Autoimmune experimental uveitis, Colitis, Hypersensitivity reaction disease, Diabetes, Crohn's disease, Systemic lupus erythematosus, Pulmonary sarcoidosis, Leishmaniasis, Experimental autoimmune encephalomyelitis, HTLV-1-associated myelopathy, Tropical spastic paraparesis, Scleroderma, or Idiopathic inflammatory myopathy (such as polymyositis and dermatomyositis). In some embodiments, an autoimmune or inflammatory disorder listed in FIG. 5, 6, 7, 8, or 9 is treated with a CRISPR pharmaceutical composition targeting a gene listed as associated with the disorder in FIG. 5, 6, 7, 8, or 9. For example, in some embodiments, allergies are treated with a CRISPR pharmaceutical composition targeting a TNFRSF1A, TNFRSF1B, TNFRSF3, TNFRSF4, or TNFRSF11A gene.

[0714] In some embodiments, the tumor necrosis factor receptor superfamily gene is an TNFRSF4 gene. In some embodiments, the TNFRSF4 gene is a human TNFRSF4 gene and the guide RNA comprises a crRNA sequence selected from SEQ ID NOs: 2867-3041. In some embodiments, editing of the TNFRSF4 gene results in a knockout of the TNFRSF4 gene. In some such embodiments, the TNFRSF4 gene is a human TNFRSF4 gene and the guide RNA comprises a crRNA sequence selected from SEQ ID NOs: 2867-2950. In some embodiments, editing of the TNFRSF4 gene results in a gene that expresses a membrane-bound receptor decoy protein. In some such embodiments, the TNFRSF4 gene is a human TNFRSF4 gene and the guide RNA comprises a crRNA sequence selected from SEQ ID NOs: 2951-2981. In some embodiments, editing of the TNFRSF4 gene results in a gene that expresses a soluble receptor decoy protein. In some such embodiments, the TNFRSF4 gene is a human TNFRSF4 gene and the guide RNA comprises a crRNA sequence selected from SEQ ID NOs: 2982-3035.

### K. TNFRSF11A

[0715] In some embodiments, the pharmaceutical composition comprising a CRISPR gene-editing system targets TNFRSF11A. In some embodiments, the CRISPR gene-editing system targeting TNFRSF11A is delivered to a mammalian cell via viral vector. In some embodiments, the CRISPR gene-editing system targeting TNFRSF11A is delivered to a mammalian cell via an AAV vector. In some embodiments, the CRISPR gene-editing system targeting TNFRSF11A is delivered to a mammalian cell via a lentiviral vector. In some embodiments, the CRISPR gene-editing system targeting TNFRSF11A is delivered to a mammalian cell via a lipid nanoparticle. In some embodiments, the CRISPR gene-editing system targeting TNFRSF11A is delivered to a mammalian cell via a virus-like particle. In some embodiments, the CRISPR gene-editing system targeting TNFRSF11A is delivered to a mammalian cell via a liposome. In some embodiments, the CRISPR gene-editing system targeting TNFRSF11A is delivered to a mammalian cell via a lipid nanocrystal.

[0716] In various embodiments, the pharmaceutical composition comprising a CRISPR gene-editing system that targets the TNFRSF11A gene is used in a method of treating a mammal in need thereof. In some embodiments, the method treats one or more joint disease or illness or one or more back or spine conditions or disorders. In some embodiments, the method treats one or more musculoskeletal diseases, conditions, and illnesses, including, but not limited to, rheumatoid arthritis, gout, osteoarthritis, osteoporosis, intervertebral disc disease (IVDD), psoriatic arthritis, arthritis, polymyositis, proliferative synovitis, bone neoplasms, sarcoid myopathy, cortex bone disorders, idiopathic scoliosis, tendinopathy, myofibrillar myopathy, enthesis-related arthritis, ankylosing spondylitis, degenerative polyarthritis, arthropathy, osteitis deformans, prolapsed lumbar disc, polymyositis ossificans, idiopathic polymyositis, Luft Disease, adult-onset Still's Disease, osteoarthritis deformans, Bachet's Disease, and combinations thereof. In other embodiments, use of the system treats one or more neoplastic diseases, conditions, and illnesses, including, but not limited to, osteosarcoma, multiple myeloma, lymphoma (e.g., B-cell or cutaneous T-cell lymphoma), leukemia, thyroid carcinoma, glioma, renal cell carcinoma, chondrosarcoma, glioblastoma, melanoma, neuroblastoma, polycystic ovary syndrome, Kaposi sarcoma, squamous cell carcinoma, leiomyosarcoma, malignant peripheral nerve sheath tumor, Ewing's sarcoma, esophageal neoplasms, colon cancer, lung cancer, breast cancer, pancreatic cancer, stomach cancer, epithelial ovarian cancer, cholectoral cancer, liver cancer, skin cancer, prostate cancer, cervical cancer, ovarian cancer, bladder cancer, oral cavity cancer, and combinations thereof. In other embodiments, the method treats one or more inflammatory diseases, conditions, and illnesses, including, but not limited to, autoinflammatory disease (AID), cryopyrin-associated periodic syndrome (CAPS), systemic lupus erythematosus (SLE), inflammatory bowel disease (IBD) and combinations thereof. In some embodiments, the method treats one or more cardiac diseases, conditions, and illnesses, including, but not limited to, myocardial infarction, heart failure (e.g., refractory or acute decompensated heart failure), arrythmias, pericarditis (e.g., refractory idiopathic pericarditis), myocarditis, sepsis-induced cardiomyopathy, atherosclerosis, coronary artery disease and combinations thereof. In some embodiments, the method treats one or more neurological diseases, conditions, and illnesses, including, but not limited to, acute thrombotic stroke, epilepsy, multiple sclerosis, Alzheimer's Disease and combinations thereof. In some embodiments, the method treats one or more ophthalmic diseases, conditions, and illnesses, including, but not limited to, uveitis, scleritis, Sjogren asthenia, dry eye and combinations thereof. In some embodiments, the method treats one or more diseases, conditions, and illnesses, including, but not limited to, chronic kidney disease, Type 2 diabetes, gastroesophageal reflux disease (GERD), non-HP-associated peptic ulcer disease, and pulmonary fibrosis.

[0717] In some embodiments, the pharmaceutical composition comprising a CRISPR gene-editing system targets TNFRSF11A for the treatment of a joint disease or illness. In some embodiments, the pharmaceutical composition comprising a CRISPR gene-editing system targets TNFRSF11A for the treatment of osteoarthritis. In some embodiments, the pharmaceutical composition comprising a CRISPR gene-editing system targets TNFRSF11A for the treatment of gout.

[0718] In some embodiments, the pharmaceutical composition comprising a CRISPR gene-editing system targets TNFRSF11A for the treatment of a musculoskeletal disorder.

[0719] In some embodiments, the pharmaceutical composition comprising a CRISPR gene-editing system targets TNFRSF11A for the treatment of a back or spine condition or disorder. In some embodiments, the pharmaceutical composition comprising a CRISPR gene-editing system targets TNFRSF11A for the treatment of low back pain. In some embodiments, the pharmaceutical composition comprising a CRISPR gene-editing system targets TNFRSF11A for the treatment of degenerative disc disorder. In some embodiments, the pharmaceutical composition comprising a CRISPR gene-editing system targets TNFRSF11A for the treatment of internal disc disruption.

### 1. Treatment of Musculoskeletal Disorders by Targeting a Tumor Necrosis Factor Receptor Superfamily Gene

[0720] In one aspect, methods and pharmaceutical compositions are provided for treating a musculoskeletal disorder using a CRISPR pharmaceutical composition that targets a Tumor Necrosis Factor Receptor Superfamily gene. In some embodiments, the CRISPR pharmaceutical composition comprises (i) an RNA-guided nuclease or a nucleic acid encoding an RNA-guided nuclease, and (ii) at least one guide RNA (gRNA), or a nucleic acid encoding at least one gRNA, targeting the Tumor Necrosis Factor Receptor Superfamily gene, where the gRNA specifically binds a target sequence that is adjacent to a protospacer adjacent motif (PAM) sequence for the RNA-guided nuclease. In some embodiments, the CRISPR pharmaceutical composition comprises (i) an mRNA encoding an RNA-guided nuclease, and (ii) at least one gRNA targeting the Tumor Necrosis Factor Receptor Superfamily gene. In some embodiments, the mRNA encoding the RNA-guided nuclease and the at least one gRNA are packaged in a lipid nanoparticle (LNP). In some embodiments, the musculoskeletal disorder is Arthritis, Infectious Intermittent joint effusion, Ankylosing spondylitis, Arthritis, Osteoarthritis, Spondylarthrites, Plantar fasciitis, Degenerative polyarthritis, Hemophilic arthropathy, Inflammatory myopathy with abundant macrophages, Polymyositis, Tendinosis, Malignant Bone Neoplasm, Osteoporosis, Psoriatic arthritis, Rheumatism, Rheumatoid arthritis, Adult Still's disease, Juvenile arthritis, Early rheumatoid arthritis, Palindromic rheumatism, Gout, Infectious Arthritis, Myotonic dystrophy, Dermatomyositis, Hemophilic arthropathy, Osteopenia, Sjogren's syndrome, Juvenile Idiopathic Arthritis, Myasthenia gravis, Osteolysis, Inflammation, Degenerative polyarthritis, Osteitis deformans, Pigmented villonodular synovitis, or Hyperphosphatasemia with bone disease. In some embodiments, a musculoskeletal disorder listed in FIG. 5, 6, 7, 8, or 9 is treated with a CRISPR pharmaceutical composition targeting a gene listed as associated with the disorder in FIG. 5, 6, 7, 8, or 9. For example, in some embodiments, Rheumatoid Arthritis is treated with a CRISPR pharmaceutical composition targeting a TNFRSF1A, TNFRSF1B, TNFRSF3, TNFRSF4, or TNFRSF11A gene.

[0721] In some embodiments, the tumor necrosis factor receptor superfamily gene is an TNFRSF11A gene. In some embodiments, the TNFRSF11A gene is a human TNFRSF11A gene and the guide RNA comprises a crRNA sequence selected from SEQ ID NOs: 3042-3335. In some embodiments, editing of the TNFRSF11A gene results in a knockout of the TNFRSF11A gene. In some such embodiments, the TNFRSF11A gene is a human TNFRSF11A gene and the guide RNA comprises a crRNA sequence selected from SEQ ID NOs: 3042-3106. In some embodiments, editing of the TNFRSF11A gene results in a gene that expresses a membrane-bound receptor decoy protein. In some such embodiments, the TNFRSF11A gene is a human TNFRSF11A gene and the guide RNA comprises a crRNA sequence selected from SEQ ID NOs: 3107-3322. In some embodiments, editing of the TNFRSF11A gene results in a gene that expresses a soluble receptor decoy protein. In some such embodiments, the TNFRSF11A gene is a human TNFRSF11A gene and the guide RNA comprises a crRNA sequence selected from SEQ ID NOs: 3323-3331.

### 2. Treatment of Neoplasia by Targeting a Tumor Necrosis Factor Receptor Superfamily Gene

[0722] In one aspect, methods and pharmaceutical compositions are provided for treating a neoplasia using a CRISPR pharmaceutical composition that targets a Tumor Necrosis Factor Receptor Superfamily gene. In some embodiments, the CRISPR pharmaceutical composition comprises (i) an RNA-guided nuclease or a nucleic acid encoding an RNA-guided nuclease, and (ii) at least one guide RNA (gRNA), or a nucleic acid encoding at least one gRNA, targeting the Tumor Necrosis Factor Receptor Superfamily gene, where the gRNA specifically binds a target sequence that is adjacent to a protospacer adjacent motif (PAM) sequence for the RNA-guided nuclease. In some embodiments, the CRISPR pharmaceutical composition comprises (i) an mRNA encoding an RNA-guided nuclease, and (ii) at least one gRNA targeting the Tumor Necrosis Factor Receptor Superfamily gene. In some embodiments, the mRNA encoding the RNA-guided nuclease and the at least one gRNA are packaged in a lipid nanoparticle (LNP). In some embodiments, the neoplasia is Neoplasms, Glioblastoma, Astrocytoma, Adenocarcinoma, Osteosarcoma, Squamous cell carcinoma, Metastasis, Ameloblastoma, Cholangiocarcinoma, Choriocarcinoma, Ovarian cancer, Prostate cancer, Lung Cancer, Larynx Cancer, Breast Cancer, Lip and Oral Cavity Carcinoma, Squamous intraepithelial lesion, Neuroblastoma, Non-Hodgkin lymphomas, Malignant Neoplasms, Skin Neoplasms, Neuroblastoma, Neoplasm Metastasis, Colorectal Cancer, Fibrosarcoma, Myeloid Leukemia, Myelofibrosis, Hodgkin Lymphomas, Non-Small Cell Lung Carcinoma, Cervical Cancer, Liver cancer, Extrapulmonary small cell carcinoma, Basal cell carcinoma, Kidney cancer, Pancreatic carcinoma, Mesothelioma, Gastric cancer, Polycystic Ovary Syndrome, Chordoma, Cholangiocarcinoma, Malignant ascites, Nasopharyngeal carcinoma, Head and Neck Carcinoma, Cancer metastasis, Prostate carcinoma, Fibrosarcoma, Liver carcinoma, Carcinoma of bladder, T-Cell Lymphoblastic Leukemia, Bladder Neoplasm, melanoma, Leukemia (such as acute myeloid leukemia), Hepatocellular carcinoma, Colorectal cancer, or Lymphoma (such as Mycosis fungoides and Sézary syndrome). In some embodiments, a neoplasia listed in FIG. 5, 6, 7, 8, or 9 is treated with a CRISPR pharmaceutical composition targeting a gene listed as associated with the disorder in FIG. 5, 6, 7, 8, or 9. For example, in some embodiments, Glioblastoma is treated with a CRISPR pharmaceutical composition targeting a TNFRSF1A, TNFRSF1B, TNFRSF3, TNFRSF4, or TNFRSF11A gene.

[0723] In some embodiments, the tumor necrosis factor receptor superfamily gene is an TNFRSF11A gene. In some embodiments, the TNFRSF11A gene is a human TNFRSF11A gene and the guide RNA comprises a crRNA sequence selected from SEQ ID NOs: 3042-3335. In some embodiments, editing of the TNFRSF11A gene results in a knockout of the TNFRSF11A gene. In some such embodiments, the TNFRSF11A gene is a human TNFRSF11A gene and the guide RNA comprises a crRNA sequence selected from SEQ ID NOs: 3042-3106. In some embodiments, editing of the TNFRSF11A gene results in a gene that expresses a membrane-bound receptor decoy protein. In some such embodiments, the TNFRSF11A gene is a human TNFRSF11A gene and the guide RNA comprises a crRNA sequence selected from SEQ ID NOs: 3107-3322. In some embodiments, editing of the TNFRSF11A gene results in a gene that expresses a soluble receptor decoy protein. In some such embodiments, the TNFRSF11A gene is a human TNFRSF11A gene and the guide RNA comprises a crRNA sequence selected from SEQ ID NOs: 3323-3331.

### 3. Treatment of Autoimmune or Inflammatory Disorders by Targeting a Tumor Necrosis Factor Receptor Superfamily Gene

[0724] In one aspect, methods and pharmaceutical compositions are provided for treating an autoimmune or inflammatory disorder using a CRISPR pharmaceutical composition that targets a Tumor Necrosis Factor Receptor Superfamily gene. In some embodiments, the CRISPR pharmaceutical composition comprises (i) an RNA-guided nuclease or a nucleic acid encoding an RNA-guided nuclease, and (ii) at least one guide RNA (gRNA), or a nucleic acid encoding at least one gRNA, targeting the Tumor Necrosis Factor Receptor Superfamily gene, where the gRNA specifically binds a target sequence that is adjacent to a protospacer adjacent motif (PAM) sequence for the RNA-guided nuclease. In some embodiments, the CRISPR pharmaceutical composition comprises (i) an mRNA encoding an RNA-guided nuclease, and (ii) at least one gRNA targeting the Tumor Necrosis Factor Receptor Superfamily gene. In some embodiments, the mRNA encoding the RNA-guided nuclease and the at least one gRNA are packaged in a lipid nanoparticle (LNP). In some embodiments, the autoimmune or inflammatory disorder is Allergy, Asthma, Multiple sclerosis, Psoriasis, Inflammatory bowel disease, Autoimmune experimental uveitis, Colitis, Hypersensitivity reaction disease, Diabetes, Crohn's disease, Systemic lupus erythematosus, Pulmonary sarcoidosis, Leishmaniasis, Experimental autoimmune encephalomyelitis, HTLV-1-associated myelopathy, Tropical spastic paraparesis, Scleroderma, or Idiopathic inflammatory myopathy (such as polymyositis and dermatomyositis). In some embodiments, an autoimmune or inflammatory disorder listed in FIG. 5, 6, 7, 8, or 9 is treated with a CRISPR pharmaceutical composition targeting a gene listed as associated with the disorder in FIG. 5, 6, 7, 8, or 9. For example, in some embodiments, allergies are treated with a CRISPR pharmaceutical composition targeting a TNFRSF1A, TNFRSF1B, TNFRSF3, TNFRSF4, or TNFRSF11A gene.

[0725] In some embodiments, the tumor necrosis factor receptor superfamily gene is an TNFRSF11A gene. In some embodiments, the TNFRSF11A gene is a human TNFRSF11A gene and the guide RNA comprises a crRNA sequence selected from SEQ ID NOs: 3042-3335. In some embodiments, editing of the TNFRSF11A gene results in a knockout of the TNFRSF11A gene. In some such embodiments, the TNFRSF11A gene is a human TNFRSF11A gene and the guide RNA comprises a crRNA sequence selected from SEQ ID NOs: 3042-3106. In some embodiments, editing of the TNFRSF11A gene results in a gene that expresses a membrane-bound receptor decoy protein. In some such embodiments, the TNFRSF11A gene is a human TNFRSF11A gene and the guide RNA comprises a crRNA sequence selected from SEQ ID NOs: 3107-3322. In some embodiments, editing of the TNFRSF11A gene results in a gene that expresses a soluble receptor decoy protein. In some such embodiments, the TNFRSF11A gene is a human TNFRSF11A gene and the guide RNA comprises a crRNA sequence selected from SEQ ID NOs: 3323-3331.

### VIII. Administration Routes

[0726] The methods and compositions herein described encompass the use of pharmaceutical compositions comprising a CRISPR gene-editing system as an active ingredient.

[0727] Depending on the method/route of administration, pharmaceutical dosage forms come in several types. These include many kinds of liquid, solid, and semisolid dosage forms. Common pharmaceutical dosage forms include pill, tablet, or capsule, drink or syrup, and natural or herbal form such as plant or food of sorts, among many others. Notably, the route of administration (ROA) for drug delivery is dependent on the dosage form of the substance in question. A liquid pharmaceutical dosage form is the liquid form of a dose of a chemical compound used as a drug or medication intended for administration or consumption.

[0728] As described below, a composition of the present disclosure can be delivered to a subject subcutaneously (e.g., intra-articular or intradiscal injection), dermally (e.g., transdermally via patch), and/or via implant. Exemplary pharmaceutical dosage forms include, e.g., pills, osmotic delivery systems, elixirs, emulsions, hydrogels, suspensions, syrups, capsules, tablets, orally dissolving tablets (ODTs), gel capsules, thin films, adhesive topical patches, lollipops, lozenges, chewing gum, dry powder inhalers (DPIs), vaporizers, nebulizers, metered dose inhalers (MDIs), ointments, transdermal patches, intradermal implant.

[0729] As used herein, “dermal delivery” or “dermal administration” can refer to a route of administration wherein the pharmaceutical dosage form is taken to, or through, the dermis (i.e., layer of skin between the epidermis (with which it makes up the cutis) and subcutaneous tissues). “Subcutaneous delivery” can refer to a route of administration wherein the pharmaceutical dosage form is to or beneath the subcutaneous tissue layer.

[0730] Methods of formulating suitable pharmaceutical compositions are known in the art, see, e.g., Remington: The Science and Practice of Pharmacy, 21st ed., 2005; and the books in the series Drugs and the Pharmaceutical Sciences: a Series of Textbooks and Monographs (Dekker, N.Y.). For example, solutions or suspensions used for parenteral, intradermal, or subcutaneous application can include the following components: a sterile diluent such as water for injection, saline solution, fixed oils, polyethylene glycols, glycerin, propylene glycol or other synthetic solvents; antibacterial agents such as benzyl alcohol or methyl parabens; antioxidants such as ascorbic acid or sodium bisulfate; chelating agents such as ethylenediaminetetraacetic acid; buffers such as acetates, citrates or phosphates and agents for the adjustment of tonicity such as sodium chloride or dextrose. pH can be adjusted with acids or bases, such as hydrochloric acid or sodium hydroxide. The parenteral preparation can be enclosed in ampoules, disposable syringes or multiple dose vials made of glass or plastic.

[0731] Pharmaceutical compositions suitable for injectable use can include sterile aqueous solutions (where water soluble) or dispersions and sterile powders for the extemporaneous preparation of sterile injectable solutions or dispersion. For intravenous administration, suitable carriers include physiological saline, bacteriostatic water, Cremophor EL™ (BASF, Parsippany, N.J.) or phosphate buffered saline (PBS). In all cases, the composition must be sterile and should be fluid to the extent that easy syringability exists. It should be stable under the conditions of manufacture and storage and must be preserved against the contaminating action of microorganisms such as bacteria and fungi. The carrier can be a solvent or dispersion medium containing, for example, water, ethanol, polyol (for example, glycerol, propylene glycol, and liquid polyethylene glycol, and the like), and suitable mixtures thereof. The proper fluidity can be maintained, for example, by the use of a coating such as lecithin, by the maintenance of the required particle size in the case of dispersion and by the use of surfactants. Prevention of the action of microorganisms can be achieved by various antibacterial and antifungal agents, for example, parabens, chlorobutanol, phenol, ascorbic acid, thimerosal, and the like. In many cases, it will be preferable to include isotonic agents, for example, sugars, polyalcohols such as mannitol, sorbitol, sodium chloride in the composition. Prolonged absorption of the injectable compositions can be brought about by including in the composition an agent that delays absorption, for example, aluminum monostearate and gelatin.

[0732] Sterile injectable solutions can be prepared by incorporating the active compound in the required amount in an appropriate solvent with one or a combination of ingredients enumerated above, as required, followed by filtered sterilization. Generally, dispersions are prepared by incorporating the active compound into a sterile vehicle, which contains a basic dispersion medium and the required other ingredients from those enumerated above. In the case of sterile powders for the preparation of sterile injectable solutions, the preferred methods of preparation are vacuum drying and freeze-drying, which yield a powder of the active ingredient plus any additional desired ingredient from a previously sterile-filtered solution thereof.

[0733] Therapeutic compounds that are or include nucleic acids can be administered by any method suitable for administration of nucleic acid agents, such as a DNA vaccine. These methods include gene guns, bio injectors, and skin patches as well as needle-free methods such as the micro-particle DNA vaccine technology disclosed in U.S. Pat. No. 6,194,389, and the mammalian transdermal needle-free vaccination with powder-form vaccine as disclosed in U.S. Pat. No. 6,168,587. Additionally, intranasal delivery is possible, as described in, inter alia, Hamajima et al., Clin. Immunol. Immunopathol., 88 (2), 205-10 (1998). Liposomes (e.g., as described in U.S. Pat. No. 6,472,375) and microencapsulation can also be used. Biodegradable targetable microparticle delivery systems can also be used (e.g., as described in U.S. Pat. No. 6,471,996).

[0734] Therapeutic compounds can be prepared with carriers that will protect the therapeutic compounds against rapid elimination from the body, such as a controlled release formulation, including implants and microencapsulated delivery systems. Biodegradable, biocompatible polymers can be used, such as collagen, ethylene vinyl acetate, polyanhydrides (e.g., poly[1,3-bis(carboxyphenoxy) propane-co-sebacic-acid] (PCPP-SA) matrix, fatty acid dimer-sebacic acid (FAD-SA) copolymer, poly(lactide-co-glycolide)), polyglycolic acid, collagen, polyorthoesters, polyethylene glycol-coated liposomes, hyaluronic acid and polylactic acid. Such formulations can be prepared using standard techniques, or obtained commercially, e.g., from Alza Corporation and Nova Pharmaceuticals, Inc. Liposomal suspensions (including liposomes targeted to selected cells with monoclonal antibodies to cellular antigens) can also be used as pharmaceutically acceptable carriers. These can be prepared according to methods known to those skilled in the art, for example, as described in U.S. Pat. No. 4,522,811. Semisolid, gelling, soft-gel, or other formulations (including controlled release) can be used, e.g., when administration to a surgical site is desired. Methods of making such formulations are known in the art and can include the use of biodegradable, biocompatible polymers. See, e.g., Sawyer et al., Yale J Biol Med. 2006 December; 79 (3-4): 141-152.

[0735] The pharmaceutical compositions described herein may be included in a container, kit, pack, or dispenser together with instructions for administration.

### A. Systemic Administration

[0736] In some embodiments, a pharmaceutical composition comprising a CRISPR gene-editing system is administered systemically to a mammal in need thereof. In some embodiments, the composition is formulated for intravenous injection. In some embodiments, the composition is formulated for oral administration. In some embodiments, the composition is formulated for parenteral administration.

### B. Local Administration

[0737] In some embodiments, a pharmaceutical composition comprising a CRISPR gene-editing system is administered locally to a mammal in need thereof. In some embodiments, the local administration is an intra-articular injection. In some embodiments, the composition is formulated for intradiscal injection. In some embodiments, the composition is formulated for epidural injection. In some embodiments, the composition is formulated for peridiscal injection. In some embodiments, the composition is formulated for perivertebral injection. In some embodiments, composition is formulated for administration to the facet joints of the spine.

[0738] In some embodiments, a pharmaceutical composition comprising a CRISPR gene-editing system is administered locally to a mammal in need thereof during a surgical procedure. In some embodiments, a pharmaceutical composition comprising a CRISPR gene-editing system is administered locally to a mammal in need thereof 1, 2, 3, 4, 5, 6, 7, 8, 9, 10, 20, or 30 days after a surgical procedure.

### EXAMPLES

[0739] The embodiments encompassed herein are now described with reference to the following examples. These examples are provided for the purpose of illustration only and the disclosure encompassed herein should in no way be construed as being limited to these examples, but rather should be construed to encompass any and all variations which become evident as a result of the teachings provided herein.

### Example 1: Design and Selection of Guides for Editing the IL1 Receptor (IL1R1)

[0740] A pipeline of in silico and in vitro screening was developed to identify candidate CRISPR-Cas guides for gene editing. The pipeline was applied to identify guides that effectively edit the canine IL1R1 receptor gene (cIL1R1), thereby disrupting IL1A/IL1B signaling in vivo. The first step in the pipeline was to identify all possible crRNA sequences for a particular CRISPR-Cas protein in the coding portions of the cIL1R1. Many algorithms for identifying such sequences are known in the art. Generally, these algorithms function by identifying a protospacer adjacent motif (PAM) sequence for the particular CRISPR-Cas protein and then locate the sequence spaced according to the requirements of the particular Cas protein, typically directly 5′ of the PAM site. For example, the S. pyogenes Cas9 (SpCas9) protein, which was used in this Example, recognizes a 5′-NGG-3′ PAM sequence. Thus, all sequences directly 5′ of an NGG trinucleotide are possible crRNA sequences. crRNA sequences identified in this fashion as shown in FIG. 27, along with biographical information about the crRNA sequence.

[0741] Next, each identified crRNA sequence was evaluated across three different metrics: possible off-target editing at locations in the genome other than the target gene, on-target editing efficiency, and the likelihood of editing causing frameshift mutations, using multiple algorithms for each metric, as illustrated in FIG. 11A. The basis of the combinatorial approach used lies in the assumption that every model has blind spots that may skew the fitness of a particular guide RNA. Weighting these scores to obtain a consensus score for each of these properties allows for much better prediction of sgRNA fitness.

[0742] Off-target editing effects were predicted by averaging scores generated by the MIT, CFD and Elevation (human only) model. The MIT algorithm, also known as Hsu-Zhang score. Hsu, P. D. et al. DNA targeting specificity of RNA-guided Cas9 nucleases. Nature Biotechnology 31, 827-832 (2013). This model is based on a positional penalty matrix (1×20) generated from 15 EMX1 sgRNA libraries with mismatches against target at every position. The CFD algorithm (Cutting Frequency Determination) is based on threat matrix (12×20) considering both position and mismatch type and PAM integrity (27,897 ‘CD33’ sgRNAs+10,618 negative control sgRNAs). Doench, J. G. et al. Optimized sgRNA design to maximize activity and minimize off-target effects of CRISPR-Cas9. Nature Biotechnology 34, 184-191 (2016). The Elevation score using machine learning algorithms trained by genome-wide (GUIDE-Seq) and other aggregated off-target profiling data. Listgarten, J. et al. Prediction of off-target activities for the end-to-end design of CRISPR guide RNAs. Nature Biomedical Engineering 2, 38-47 (2018). The column labelled “OFF” shows the mean of the scores provided by the two or three models, respectively. The column labelled “OffTarget #” shows the number of potential off-targets with up to four mismatches as calculated by CRISPOR. See, Haeussler, M. et al. Evaluation of off-target and on-target scoring algorithms and integration into the guide RNA selection tool CRISPOR. Genome Biology 17, 148 (2016).

[0743] On-target editing efficiencies were predicted by averaging scores generated by the Azimuth model, the DeepSpCas9 model, and the CrisprScan model. The Azimuth model is a boosted regression tree model, trained with 881 sgRNAs (MOLM13/NB4/TF1 cells and additional unpublished data) delivered by lentivirus. Doench, J. G. et al. Optimized sgRNA design to maximize activity and minimize off-target effects of CRISPR-Cas9. Nature Biotechnology 34, 184-191 (2016). DeepSpCas9 is a deep learning model trained using editing data from 12,832 sgRNA. Kim, H. K. et al. SpCas9 activity prediction by DeepSpCas9, a deep learning-based model with high generalization performance. Science Advances 5 (11) (2019). CrisprScan is a linear regression model, trained using editing data from 1000 sgRNAs injected into zebrafish embryos targeting >100 genes. Moreno-Mateos, M. A. et al. CRISPRscan: designing highly efficient sgRNAs for CRISPR-Cas9 targeting in vivo. Nature Methods 12, 982-988 (2015). The column labelled “ON” shows the mean of the scores provided by the three models.

[0744] The putative guides' potential to generate frameshift mutations were predicted by averaging scores generated by the Lindel model and the InDelphi model. Lindel is a machine learning model trained using profile data of 1.16 million independent mutational events triggered by CRISPR/Cas9-mediated cleavage and non-homologous end joining-mediated double strand break repair of 6872 synthetic target sequences, introduced into a human cell line via lentiviral infection. Chen, W. et al. Massively parallel profiling and predictive modeling of the outcomes of CRISPR/Cas9-mediated double-strand break repair. Nucleic Acids Research 47, 7989-8003 (2019). InDelphi is machine learning model trained with indels generated by 1872 sgRNAs. Shen, M. W. et al. Predictable and precise template-free CRISPR editing of pathogenic variants. Nature 563, 646-651 (2018). The column labelled “Frameshift” shows the mean of the scores provided by the two models. The column labelled “Precision” shows the frequency distribution of indels estimated by inDelphi. High precision is closer to 100 and represents sgRNAs that are characterised by one or a very low number of repair outcomes.

[0745] The candidate crRNA sequences were then evaluated for the presence of Graf motifs, TT or GCC present in the 4 PAM proximal bases of the crRNA sequence, as indicated in, e.g., FIGS. 26-42, as either TT or GCC. Graf, R. et al. sgRNA Sequence Motifs Blocking Efficient CRISPR/Cas9-Mediated Gene Editing. Cell Reports, 26 (5), 1098-103 (2019). Graf et al. reported that TT- and GCC-motifs are a hallmark of inefficient sgRNAs. If possible, crRNA with Graf motifs and in particular the GCC motif were avoided. In contrast to the TT motif, the GCC motif remains critical if sgRNAs are synthesized de novo rather than by transcription.

[0746] As shown in, e.g., FIGS. 26-42, three consensus scores were then calculated for each crRNA sequence. The “ON-OFF” score represents the mean of the “ON” and “OFF” score. The “OFF-FS” score represents the mean of the “OFF” and “Frameshift” score. The OVERALL score represents the mean of the “ON”, “OFF” and “Frameshift” score. Additionally, for human only, VBC's Bioscore was used to predict whether a possible in-frame mutation could disturb protein function. This is more likely to occur in conserved genomic DNA sequences coding for critical protein domains. Thus, Bioscore is based on protein domain annotations, phylogenetic conservation, amino acid identities and exon size. Michlits, G. et al. Multilayered VBC score predicts sgRNAs that efficiently generate loss-of-function alleles. Nature Methods 17, 708-716 (2020). The final criteria for selecting candidates is mainly based on the OVERALL score (in most cases >70), the relative low counts of potential off-targets (in most cases <200 off-targets), the absence of Graf motifs (if possible) and the genomic cut position within the coding sequence to produce knockouts or truncated proteins with reduced functionality (e.g. decoy receptors),

[0747] Finally, the IL1R1 domain in which each crRNA guides editing was determined based on the nucleotide position in the gene. The domain location is used to predict whether the edit will result in a wild-type like protein (edits in the sequence encoding the extreme C-terminus of a receptor that are unlikely to disrupt receptor-mediated signaling), complete knock-out of any functional protein (edits in the sequence encoding the N-terminus and/or essential functional domains), a soluble decoy receptor (edits in the sequence encoding the transmembrane domain of the receptor), or a membrane-bound decoy receptor (edits in the sequence encoding the intracellular signaling domain of the receptor).

[0748] Indeed, this in silico analysis established that several candidate sgRNAs were predicted to yield genomic edits that would create a dominant negative (DN) IL1R1, thereby impacting intracellular pro-inflammatory signaling (FIG. 11A). In support of the robustness of these analyses, structural predictions also demonstrated that editing with these particular sgRNAs would yield an expressible form of IL1R1 protein (either soluble or membrane-bound) that cannot induce the ligand's signal (FIG. 11B). Taken together, these predictive studies demonstrated the feasibility of inducing a dominant negative canine IL1 receptor as a unique approach to tamping down inflammation in cells and provided a high-throughput method for validating candidates without the need for time- and resource-intensive brute force methods.

### Example 2: Validation of Dn IL1R1 in Canine Cells

[0749] Having designed and analyzed numerous sgRNA candidates that were predicted to edit IL1 receptor to produce a dominant negative reception, the next step was to assess their ability to act in vitro. Of particular interest is whether the preferred (i.e., on-target) edit would be observed in edited cells.

[0750] To test this, 80 pmoles of sgRNA candidates were introduced into canine DH82 monocytes via electroporation as part of a ribonucleoprotein (i.e., pre-assembled with 25 pmoles of Cas9 protein at room temperature for at least 5 min). In brief, around 600,000 cells resuspended in 20 μl PKM buffer (2.7 mM KCl, 137 mM NaCl, 10 mM Na2HPO4/1.8 mM NaH2PO4 (pH 7.4) and 50 mM D-Mannitol) were added to the pre-assembled Cas9 ribonucleoprotein complex, transferred into 16-well nucleocuvettes and electroporated with pulse code CM-137 using the 4D nucleofector (Lonza). Electroporated cells were kept in PKM buffer for about 10 min before transferring them into 6-well tissue culture plates with complete culture media. After 2-5 days in culture, cells were dissociated for genomic DNA extraction using the DNeasy Blood & Tissue Kit (Qiagen). sgRNA target regions were amplified by PCR and editing efficacy was then deduced from Sanger sequencing traces using Inference of CRISPR Edits (ICE v1.2). See, Conant, D. et al. (2022). The CRISPR Journal, 5 (1), 123-130.

[0751] While multiple candidates were indeed able to induce mutation in the IL1R1 gene at high efficiency-including several exhibiting frequencies above 95%-two lead candidates exhibited the ability to consistently induce the same on-target edit in a high percentage of cells (FIG. 12). These results confirmed the robustness of the in silico analysis and suggested that at least OCR13 (SEQ ID NO: 3403) and OCR14 (SEQ ID NO: 3336) are able to produced DN IL1 receptors in canine cells.

### Example 3: Impact of Cas9 Mutants with Enhanced Specificity

[0752] With the ultimate aim to eliminate off-target editing without sacrifizing on-target activity, the lead candidate sgRNAs were assembled with different high-fidelity Cas9 variants (i.e. mutated Cas9 nucleases with enhanced specificity; see generally, Slaymaker, I. M. et al (2016). Science, 351 (6268): 84-88; Vakulskas, C. A. et al. (2018). Nature Medicine, 24 (8): 1216-1224) and assessed for frameshift efficacy and precision (i.e. the primacy for single or low number of repair outcomes) in canine DH82 monocytes.

[0753] Among the high-fidelity Cas9 nucleases, AR-Cas9 (IDT, Catalogue #1081060; Vakulskas, C. A. et al. (2018). Nature Medicine, 24 (8): 1216-1224) performed best overall with the lead candidate sgRNAs. In comparison to wild-type Cas9 (WT-Cas9), AR-Cas9 reached similarly high frameshift efficacy (>97%) and precision (>83%) when paired with OCR13 (FIG. 13A) and OCR14 (FIG. 13B). The other high-fidelity Cas9 nucleases tested were ES-Cas9 (Growth Factory, eSpCas9 (1.1); Slaymaker, I. M. et al (2016). Science, 351 (6268): 84-88), HF-Cas9 (Invitrogen, Catalogue #A50576) and PE-Cas9 (Merck Life Science, Catalogue #PECAS9-250).

[0754] However, AR-Cas9 like all other high-fidelity Cas9 nucleases (ES-Cas9, PE-Cas9 and HF-Cas9) showed decreased editing efficacy with OCR06, as compared to a combination with WT-Cas9 (FIG. 13C). Also, OCR10, which exhibits high precision with WT-Cas9, gives rise to a second frameshift edit at frequency 20-30% with all tested high-fidelity Cas9 nucleases (FIG. 13D). These results, taken as a whole, suggested that pairings between high-fidelity RNA-dependent nuclease and sgRNA would likely need to be done on a case-by-case basis.

### Example 4: Design for IL1RAP/IL1RAP Decoy Proteins

[0755] IL1RAP is the co-receptor of all IL1 ligands, including IL33, which activates the IL1RL1/IL1RAP receptor dimer rather than the IL1A/B-specific IL1R1/IL1RAP. Thus, like other IL1R complex proteins, IL1RAP may be another potent mediator of inflammation that can be exploited for therapeutic purposes.

[0756] To test this, 10 candidate sgRNAs were designed to target different exons of canine IL1RAP with the objective to either ablate IL1RAP expressing (OCP01 to OCP06) or generate decoy IL1RAP proteins that will not transduce a pro-inflammatory signal (OCP07 to OCP10) (FIG. 14A). For example, OCP07 is predicted to predominantly produce an A duplication in exon 9 of IL1RAP, which shifts the open reading frame at position 355. At the protein level, this causes a Threonine (T) to Asparagine (N) amino acid change and prematurely terminates translation at position 395. Based on AlphaFold2-generated models, this +1 frameshift converts IL1RAP into a soluble IL1RAP decoy (IL1RAP_{T355NfsTer41}) missing the transmembrane and the cytoplasmic TIR domain (FIG. 14B).

[0757] Having done the predictive analysis, the next step was to assess performance in vitro. Candidate sgRNAs were paired with WT-Cas9 and introduced into canine DH82 monocytes via electroporation and editing efficacy and precision assessed by ICE. As predicted with an OVERALL score of 82, OCP02 performed best among the knockout candidates with virtually 100% KO rate due to a single C deletion introducing a premature stop codon at position 32 (M32*) (FIG. 15). All decoy-producing sgRNA candidates exhibited strong editing efficacy (greater than 95%). OCP09 and OCP10 demonstrated the strongest editing primacy with the top edit reaching 89% and 95%, respectively.

### Example 5: Editing of IL1RAP/IL1RAP in Various Canine Cell Types with High Fidelity Nucleases

[0758] Having designed and validated numerous guides targeting IL1RAP, the next step was to validate them with high-fidelity Cas9 nuclease to mitigate potential off-target effects during the editing process. To do this, one or two sgRNAs with the strongest frameshift scores (FIG. 16A) for each type of interference (e.g., knockout or decoy receptor) were selected and paired with different high-fidelity Cas9 nucleases to see which, if any, would show similar on-target activity to WT-Cas9, while potentially reducing undesirable off-target effects.

[0759] Indeed, for each selected sgRNA, the editing efficacy in canine DH82 monocytes remained strongly dependent upon which high-fidelity Cas9 nuclease was used (FIG. 16B). Notably, AR-Cas9 most consistently showed high frequency of the desired edit in canine IL1RAP. This was particularly true in the case of OCP02, OCP07, and OCP10. However, this was effect was not universal, as the frameshift score for OCP09 was decreased when paired with AR-Cas9. OCP02, OCP07 and OCP10 also performed well in a head-to-head comparison of WT-Cas9 and AR-Cas9 in canine synovial fibroblasts (FIG. 16C). As such, high-fidelity RNA-dependent nucleases appeared to generally impact editing efficiency, though the magnitude of such effects will likely vary depending upon the nuclease used and to a lesser extent the cell type to be edited.

[0760] Having observed strong on-target activity when pairing sgRNA with high-fidelity Cas9 nucleases, the next step involved expansion of the assay to include numerous relevant canine cell types, such as DH82 monocytes, chondrocytes, and synovial fibroblasts. Specifically, the same select sgRNAs were used with AR-Cas9 in DH82 monocytes, where a strong preference for each desired edit was again observed (FIG. 17A). Similar editing efficacies were also observed in chondrocytes (FIG. 17B) and synovial fibroblasts (FIG. 17C). This result demonstrated that consistently high editing efficacies and precision for a given sgRNA and high-fidelity RNA-dependent nuclease pairing was achieved across various cell types.

### Example 6: Editing of IL1R1 Renders Canine Synoviocytes Unresponsive to IL1B Treatment

[0761] Having designed and validated numerous guides targeting IL1R1, the next step involved functional testing of edited cells. As part of this testing, around 300,000 edited canine synoviocytes were treated with 100 μM human recombinant IL1β for 4 hours. Reverse transcription followed by quantitative PCR (RT-qPCR) on extracted total RNA was carried out to verify whether human recombinant IL1β can stimulate the transcription of the inflammatory marker prostaglandin-endoperoxide synthase 2 (PTGS2/COX-2). No observable transcriptional upregulation of PTGS2/COX-2 was detected, likely because canine IL1R1 does not have a high enough affinity for human IL1β at 100 μM. Indeed, upon repeating of the protocol with recombinant canine IL1B (R&D Systems, 3747-CL), robust upregulation was observed (FIG. 18). However, edited canine cells exhibited no such upregulation, suggesting that IL1β signaling had been disrupted. Both types of IL1R1 interference, knockout (OCR06/OCR10) or decoy receptor conversion (OCR13/OCR14), repressed PTGS2 transcription by 97% or more, which was line with the observed genetic frameshift score.

[0762] Because of the well-established relationship between IL1 receptor activation and additional pro-inflammatory transcriptional responses, such as the upregulation of IL6 (see, Attur, M. G. et al. (1998). Proceedings of the Association of American Physicians, 110 (1): 65-72), the same assay was used to determine the effect of IL1R1 editing on this pro-inflammatory response following IL1ß treatment. Similar to PTGS2/COX-2, unedited cells exhibited robust upregulation of IL6 after treatment, while no edited cells exhibited this response (FIG. 19). Taken together, these results showed that edited cells had lost the ability to respond to IL1β treatment.

### Example 7: Editing of IL1RAP/IL1RAP Reduces Cox-2 Upregulation in Canine Monocytes Following Exposure to Multiple Inflammatory Triggers

[0763] To understand the potential nexus between a dysfunctional IL1RAP and reductions in pro-inflammatory signaling, the transcriptional response to various inflammatory triggers, such as bacterial lipopolysaccharides (LPS), monosodium urate (MSU) crystals and IL1B, were investigated in canine control and IL1RAP-edited DH82 monocytes (biological triplicates, N=3) using bulk RNA-Seq and differential expression analysis DESeq2 (FIG. 20). All edited cell lines were genotyped, and all CRISPR-induced frameshift scores perfectly aligned with previous efficacy readings. Cells were exposed to saline solution PBS (negative control), 1 μg/ml LPS, 100 μM IL1ß or 400 μg/ml MSU crystals, and total RNA was extracted after 4 and 24 hours. IL1RAP genotypes and inflammatory induction of PTGS2 were verified in control and edited cells (FIG. 21).

[0764] Prior to performing RNA-Seq, the transcriptional effect of inflammatory triggers was validated by RT-qPCR. Stimulation with LPS resulted in strong PTGS2 upregulation at both 4 hours (FIG. 21A) and 24 hours (FIG. 21B). The edited canine cells exhibited similar levels of upregulation, particularly at 24 hours, suggesting that the loss of IL1RAP did not impact LPS-mediated inflammatory signaling, which canonically occurs through engagement of Toll-like receptors, such as TLR2 (see generally, Erridge, C. (2010). Journal of Leukocyte Biology, 87 (6): 989-999.). By contrast, while treatment with either IL1β or MSU also stimulated upregulation in control cells, the edited cells demonstrated abrogation at 4 h and, in particular, at 24 h with PTGS2 induction being repressed by 93% or more. Under control conditions (i.e., PBS treatment) no induction was observed at either time point, and, as observed for IL1R1, similar levels of abrogation of inflammatory signaling were observed whether the cells were edited to generate a knockout (OCP02) or a decoy receptor (OCP07).

### Example 8: Editing of IL1RAP/IL1RAP Reduces Responsiveness of Various Canine Cell Types to IL1B Treatment

[0765] Having designed and validated numerous sgRNAs targeting IL1RAP and having observed reductions in pro-inflammatory signaling at the transcriptional level in canine monocytes, the functional assays continued, this time in edited canine chondrocyte and synoviocytes. As part of this testing, around 300,000 edited canine synoviocytes were treated with 100 μM recombinant canine IL1β for 4 hours. Reverse transcription followed by quantitative PCR (RT-qPCR) on extracted total RNA was carried out to assess the transcriptional impacts of IL1B. Indeed, robust upregulation of PTGS2 was observed in control chondrocytes (FIG. 22A). However, edited canine chondrocytes exhibited no such upregulation, suggesting that IL1β signaling had been disrupted by the interference of IL1RAP, whether the cells were edited to generate a knockout or a decoy receptor. Similarly, control synoviocytes responded to treatment (FIG. 22B). However, the edited canine synoviocytes exhibited differential upregulation, with strong abrogation of IL1β signaling observed when the cells were edited to generate a knockout or a soluble decoy receptor (OCP07). Interestingly, generation of a membrane-bound decoy (OCP10) IL1RAP had little impact on this transcriptional upregulation in synoviocytes. This was likely due to inefficient IL1RAP editing in canine synoviocytes (see FIG. 17C). Repeat experiments are currently underway. These results demonstrated that editing of IL1RAP in various cell types can impact function in response to IL1β exposure.

### Example 9: LNP-Based Delivery of mRNA in Various Canine Cell Types

[0766] To this point, nearly all validation experiments had been conducted via electroporation of cell cultures to introduce RNA-dependent nucleases and sgRNAs.

[0767] However, to assess the suitability of using lipid nanoparticle (LNP) to deliver mRNA to mammalian cells, LNPs from PNI containing Trilink Firefly Luciferase mRNA were exposed to canine synovial fibroblasts for 8 hours and canine chondrocytes for 24 hours at increasing concentrations (based on a stock 0.1 mg/mL solution). At each time point, a luciferase and Bradford assay were conducted to detect and normalize cellular luciferase activity.

[0768] For synovial fibroblasts, increasing luciferase activity was observed with an increase in LNP concentrations from 1% (v/v) to 4% (v/v); however, no statistically significant difference was observed between 4% (v/v) and 8% (v/v) (FIG. 23A). For chondrocytes, similar dose dependency was observed (FIG. 23B). These results showed that the LNP formulation is competent in delivering its cargo in the form of mRNA into therapeutically relevant cells.

[0769] Further tests were also conducted to show the safety of these LNP formulations in an organism, particularly in dogs. Low doses (0.025 mg/ml) of LNP compositions (or saline control) were injected into healthy joints of dogs after performing baseline cytology studies on synovial fluid to determine the baseline counts of monocytes, neutrophils, and lymphocytes (FIG. 24A). The same cytology tests were undertaken again four weeks after injection and showed no appreciable differences from the baseline results in the canine synovial fluid (FIG. 24B). Further, no changes in relative counts for any one cell type were observed post injection. Together, these results demonstrated that LNPs can be used to introduce mRNA into multiple canine cell types, while canine injection studies showed that use of these LNPs do not stimulate in vivo inflammatory responses in mammals.

### Example 10: Differential Transcriptional Responses in IL1RAP/IL1RAP-Edited Canine Monocytes are Attributable to the Interference of the Gene

[0770] Functional assays had shown that IL1RAP knockouts or decoys made cells less responsive to some inflammatory triggers. However, how IL1 signaling contributes to the inflammatory response such as gout-like MSU crystals and whether the various strategies to interfere with it shows any differences on a genome-wide scale remained unclear. To test this, transcriptome-wide analysis was undertaken in either control or edited cells treated with various pro-inflammatory triggers for either 4 or 24 hours as previously described. The transcriptomes of these cells were then subjected to principal component analysis (PCA) to obtain a first view about their relationships to each other (FIG. 25A). This PCA (covering 77% of transcriptional variance across all samples) found that IL1RAP knockout and decoys were similarly effective in preventing differential transcription in cells treated with IL1β (both after 4 and 24 hrs) and MSU crystals (after 24 hrs), as noted by the distance between the control and IL1RAP-edited cells on the plot. However, LPS treatment was largely unaffected by the editing of IL1RAP, as noted by the clustering of control and edited cells on the plot. As expected, in the absence of an inflammatory trigger, genetic IL1RAP interference did not substantially change transcription as shown by the tight clustering of control and edited cells treated with PBS.

[0771] The results of the PCA were further supported by a more detailed analysis of differentially expressed genes. For instance, unedited cells exhibited strong transcriptional induction of numerous inflammatory markers upon stimulation with IL1β for 24 hours, including IL1B, IL6, PTGS2, and TNF (FIG. 25B). Similar results were observed with MSU treatment (FIG. 25C). However, cells with edited IL1RAP genes exhibited dramatically reduced induction of each of these genes. Notably, this reduction occurred regardless of the type of interference to IL1RAP (i.e., knockout or decoy receptor), and this reduction did not impact induction of the IL1R antagonist (IL1R2) or the housekeeping gene GAPDH.

[0772] A Venn diagram was generated for differentially expressed genes (fold change >2; FDR<10%) to show uniquely upregulated or downregulated in response to 24 hours of IL1B or MSU treatment in control and IL1RAP-edited cells. More than half of the surveyed transcripts-733 in total-were upregulated by IL1β treatment in unedited cells only (FIG. 25D). By contrast, no more than 72 upregulated genes were unique to each IL1RAP-edited cell pool. Similarly for non-shared downregulated genes, unedited cells showed more than half of the surveyed transcripts, while IL1RAP-edited cells were largely inert (FIG. 25E). A similar profile, albeit with less robust up- and downregulation of genes was observed with MSU treatment (FIGS. 25F, G). Taken together, these results demonstrated that (1) IL1RAP edits were the root cause of the functional differences observed between edited and control cells, (2) all types of gene interference demonstrated similar transcriptional profiles in being refractory to IL1β treatment, and (3) that IL1RAP interference could mitigate the inflammatory response to MSU crystals, which indicates a promising avenue to treat gout.

### Example 11: Validation of TGFBR1 Editing in Human Cells

[0773] Having designed and analyzed numerous sgRNAs that were predicted to edit the TGFBR1 receptor to produce either a knockout or (soluble or membrane-bound) dominant negative decoy by bioinformatic methods described in Example 1 (see, FIG. 34), the next step was to assess their ability to act in vitro. Of particular interest was whether the one preferred, on-target edit would be observed in any of the candidates.

[0774] To test this, the sgRNA candidates were complexed with a Cas9 nuclease to form a ribonucleoprotein (RNP) complex before electroporating human THP-1 monocytes to introduce the RNPs to the cells as previously described above. Editing efficiency was then measured via sequencing. While multiple candidates were able to induce mutations in the hTGFBR1 gene at high efficiency, with several exhibiting frequencies above 50% with wtCas9 (FIG. 45A), this efficacy was universally reduced with use of the AR-Cas9 variant (FIG. 46B). Notably, pairing AR-Cas9 with OHTIR04 (SEQ ID NO: 1455) resulted in greater edit primacy (i.e., only the single, on-target edit was observed), albeit at a lower editing efficiency. These results generally confirmed the in silico analysis and suggested that several sgRNA candidates, including OHTIR04, were able to efficiently edit TGFBR1 in human cells at some frequency.

### Example 12: Validation of TGFBR2 Editing in Human Cells

[0775] Having designed and analyzed numerous sgRNAs that were predicted to edit the TGFBR2 receptor to produce either a knockout or (soluble or membrane-bound) dominant negative decoy by bioinformatic methods described in Example 1 (see, FIG. 35), the next step was to assess their ability to act in vitro. Of particular interest was whether the one preferred edit would be observed in any of the candidates.

[0776] To test this, the sgRNA candidates were complexed with a Cas9 nuclease to form a ribonucleoprotein (RNP) complex before electroporating human THP-1 monocytes to introduce the RNPs to the cells as previously described above. Editing efficiency was then measured via sequencing. While multiple candidates were able to induce mutations in the hTGFBR2 gene at high efficiency, with several exhibiting frequencies near or above 50% with wtCas9 (FIG. 46A), this efficacy was universally reduced with use of the AR-Cas9 variant (FIG. 46B). Notably, pairing AR-Cas9 with OHTIIR11 (SEQ ID NO: 1466) resulted in increased editing primacy (i.e., proportion of the editing comprised by the desired on-target edit), albeit at a lower editing efficiency than with wtCas9. These results generally confirmed the in silico analysis and suggested that several sgRNA candidates, including OHTIIR11, were able to efficiently edit TGFBR2 in human cells at some frequency.

### Example 13: Editing of TGFBR1 or TGFBR2 Renders Human Monocytes Unresponsive to TGF-Beta Stimuli

[0777] Having designed and validated numerous guides targeting the TGF-beta pathway, the next step involved functional testing of edited cells. As part of this testing, around 300,000 edited human THP-1 monocytes were treated with either 1 μg/ml LPS or 20 ng/μl recombinant TGF-beta for 6 hours. Reverse transcription of total cellular RNA was followed by quantitative PCR (RT-qPCR) was carried out to verify whether human either LPS or TGF-beta can stimulate the transcription of TGFB1 as has been previously reported (see generally, Yan, X., et al. (2018). Acta Biochimica et Biophysica Sinica, 50 (1), 37-50.). LPS treatment did not induce robust expression of TGFB1 in control cells as compared to those treated with PBS (FIG. 47A). Despite this lack of response, TGFB1 levels were reduced as much as five-fold for TGFBR1-edited cells compared to the unedited control, while TGFBR2-edited cells exhibited a more modest two-fold reduction.

[0778] As an additional test, the same cellular RNA was assayed for induction of TIMP1, which canonically is upregulated by TGF-beta signaling via the SMAD proteins (see generally, Hall, M. C., et al. (2003). Journal of Biological Chemistry, 278 (12), 10304-10313.). In the LPS-treated cells, robust induction of TIMP1 was observed in the unedited control as compared to the PBS-treated cells (FIG. 47B). TGFBR1-edited monocytes demonstrated a two-fold decrease in TIMP1 induction as compared to the unedited control. There was no change for TGFBR2-edited cells

[0779] Results were even more striking following treatment with the natural ligand. In response to TGF-beta treatment, TGFB1 induction was more robust, and edits to either TGFBR1 or TGFBR2 reduced this response by two-fold (FIG. 47C). These results were similar to those observed for TIMP1 induction following TGF-beta treatment (FIG. 47D). These results collectively showed that the edited cells did not respond to TGF-beta treatment, as their levels of TGFB1 remained well below the PBS-treated control. Taken together, these results demonstrated that TGF-beta positive feedback (TGFB1 induction) and downstream signaling (TIMP1 induction) were both impaired in cells with edited TGFBR1 and TGFBR2.

### Example 14: Validation of IL1R1 Editing in Human Cells

[0780] Having designed and analyzed numerous sgRNA candidates that were predicted to edit the human IL1 receptor to produce either a knockout or a dominant negative receptor (see FIG. 48A), the next step is to assess their ability to act in vitro. Of particular interest is whether the preferred (i.e., on-target) edit will be observed in edited cells.

[0781] To test this, 80 pmoles of sgRNA candidates (SEQ ID NOs: 3491-3513) are introduced into human THP-1 monocytes via electroporation as part of a ribonucleoprotein (i.e., pre-assembled with 25 pmoles or either wtCas9 or AR-Cas9 protein at room temperature for at least 5 min). In brief, around 600,000 cells resuspended in 20 μl PKM buffer (2.7 mM KCl, 137 mM NaCl, 10 mM Na2HPO4/1.8 mM NaH2PO4 (pH 7.4) and 50 mM D-Mannitol) are added to the pre-assembled Cas9 ribonucleoprotein complex, transferred into 16-well nucleocuvettes and electroporated with pulse code CM-137 using the 4D nucleofector (Lonza). Electroporated cells are kept in PKM buffer for about 10 min before transferring them into 6-well tissue culture plates with complete culture media. After 2-5 days in culture, cells are dissociated for genomic DNA extraction using the DNeasy Blood & Tissue Kit (Qiagen). sgRNA target regions are amplified by PCR and editing efficacy is then deduced from Sanger sequencing traces using Inference of CRISPR Edits (ICE v1.2). Conant, D. et al. (2022). The CRISPR Journal, 5 (1), 123-130 (2022).

[0782] It is anticipated that results of these studies will confirm the robustness of the in silico analysis and identify multiple candidates are indeed able to induce mutation in the IL1R1 gene at high efficacy. It is further expected that use of AR-Cas9 will improve editing efficacy (i.e., increase on-target editing) as compared to wtCas9.

### Example 15: In Vitro Delivery of IL1R1-Editing Guide RNA to Human Cells Via Lipid Nanoparticles

[0783] Because all validation experiments are to be conducted via electroporation of cell cultures to introduce RNA-dependent nucleases and sgRNAs, additional experiments will assess the suitability of using lipid nanoparticle (LNP) to deliver mRNA to human cells. 0.025 mg/mL of LNPs from PNI containing either 80 pmoles of sgRNA (SEQ ID NOs: 3491-3513) or 80 pmoles of Cas9 mRNA (alternatively, sgRNA may be pre-assembled with 25 pmoles or either wtCas9 or AR-Cas9 protein at room temperature for at least 5 min and encapsulated as an RNP) are exposed to THP-1 monocytes for 8 to 24 hours under typical cell culture conditions. Sanger sequencing as described in Example 14 will be used to validate editing. Upon confirmation of editing various functional assays as described in Example 13 will be performed.

### Example 16: In Vitro Delivery of IL1R1-Editing Guide RNA to Human Cells Via Adeno-Associated Virus

[0784] Because all validation experiments are to be conducted via electroporation of cell cultures to introduce RNA-dependent nucleases and sgRNAs, additional experiments will assess the suitability of using adeno-associated virus (AAV) vectors to deliver sgRNA to human cells.

TABLE 2
Exemplary AAV vectors for introduction of sgRNA to human cells.

AAVPrime ™ Adeno-Associated Virus - Serotype6 (AAV-6) Particles for sgRNA
(GeneCopoeia ™, catalog No. AA06-MCP001682-AD01-2-200-a, lot No. GC03182K2001)
AAVPrime ™ Adeno-Associated Virus - Serotype6 (AAV-6) Particles for sgRNA
(GeneCopoeia ™, catalog No. AA06-MCP001682-AD01-2-200-b, lot No. GC03202K2001)
AAVPrime ™ Adeno-Associated Virus - Serotype6 (AAV-6) Particles for sgRNA
(GeneCopoeia ™, catalog No. AA06-CCPCTR01-AD01-200, lot No. GC03112K2002)
AAVPrime ™ Adeno-Associated Virus - Serotype5 (AAV-5) Particles for sgRNA
(GeneCopoeia ™, catalogue No. AA05-MCP001682-AD01-2-200A, lot No. GC-
03182K2002)
AAVPrime ™ Adeno-Associated Virus - Serotype5 (AAV-5) Particles for sgRNA
(GeneCopoeia ™, catalogue No. AA05-MCP001682-AD01-2-200B, lot No.
GC03182K2003)
AAVPrime ™ Adeno-Associated Virus - Serotype5 (AAV-5) Particles for sgRNA
(GeneCopoeia ™, catalogue No. AA05-CCPCTR01-AD01-200, lot No. GC03032K2003)

[0785] Exemplary AAV vectors are shown in Table 2. After being prepared according to manufacturer specifications, such that one or more of the sgRNAs containing SEQ ID NOs: 3491-3513 are integrated into the viral vector, said vectors are incubated (MOI=0.1 to 10) with approximately 500,000 U2OS cells that have been stably transfected with Cas9 (see, e.g., Rojas-Fernandez, A., et al. (2015). Scientific Reports, 5 (1), 1-6.). At 2-7 days post-infection, Sanger sequencing as described in Example 14 will be used to validate editing. Upon confirmation of editing, various functional assays as described in Example 13 will be performed.

### Example 17: Validation of IL1Rap Editing in Human Cells

[0786] Having designed and analyzed numerous sgRNA candidates that were predicted to edit the human IL1 receptor accessory protein to produce either a knockout or a dominant negative receptor (see FIG. 48B), the next step is to assess their ability to act in vitro. Of particular interest is whether the preferred (i.e., on-target) edit will be observed in edited cells.

[0787] To test this, 80 pmoles of sgRNA candidates (SEQ ID NOs: 3514-3543) are introduced into human THP-1 monocytes via electroporation as part of a ribonucleoprotein as previously described in Example 14.

[0788] It is anticipated that results of these studies will confirm the robustness of the in silico analysis and identify multiple candidates are indeed able to induce mutation in the IL1RAP gene at high efficacy. It is further expected that use of AR-Cas9 will improve editing efficacy (i.e., increase on-target editing) as compared to wtCas9.

### Example 18: In Vitro Delivery of IL1Rap-Editing Guide RNA to Human Cells Via Lipid Nanoparticles

[0789] Because all validation experiments are to be conducted via electroporation of cell cultures to introduce RNA-dependent nucleases and sgRNAs, additional experiments will assess the suitability of using lipid nanoparticle (LNP) to deliver mRNA to human cells. LNPs containing either sgRNA (SEQ ID NOs: 3514-3543) or Cas9 mRNA are incubated with THP-1 monocytes, followed by validation of editing as described in Example 15. Upon confirmation of editing various functional assays as described in Example 13 will be performed.

### Example 19: In Vitro Delivery of IL1Rap-Editing Guide RNA to Human Cells Via Adeno-Associated Virus

[0790] Because all validation experiments are to be conducted via electroporation of cell cultures to introduce RNA-dependent nucleases and sgRNAs, additional experiments will assess the suitability of using adeno-associated virus (AAV) vectors to deliver sgRNA to human cells. Exemplary AAV vectors are shown in Table 2. After being prepared according to manufacturer specifications, such that one or more of the sgRNAs containing SEQ ID NOs: 3514-3543 are integrated into the viral vector, said vectors are introduced to human U2OS cells and editing is validated as previously described in Example 16. Upon confirmation of editing, various functional assays as described in Example 13 will be performed.

### Example 20: Validation of IL6R Editing in Human Cells

[0791] Having designed and analyzed numerous sgRNA candidates that were predicted to edit the human IL6 receptor protein to produce either a knockout or a dominant negative receptor (see FIG. 48C), the next step is to assess their ability to act in vitro. Of particular interest is whether the preferred (i.e., on-target) edit will be observed in edited cells.

[0792] To test this, 80 pmoles of sgRNA candidates (SEQ ID NOs: 3544-3566) are introduced into human THP-1 monocytes via electroporation as part of a ribonucleoprotein as previously described in Example 14.

[0793] It is anticipated that results of these studies will confirm the robustness of the in silico analysis and identify multiple candidates are indeed able to induce mutation in the IL6R gene at high efficacy. It is further expected that use of AR-Cas9 will improve editing efficacy (i.e., increase on-target editing) as compared to wtCas9.

### Example 21: In Vitro Delivery of IL6R-Editing Guide RNA to Human Cells Via Lipid Nanoparticles

[0794] Because all validation experiments are to be conducted via electroporation of cell cultures to introduce RNA-dependent nucleases and sgRNAs, additional experiments will assess the suitability of using lipid nanoparticle (LNP) to deliver mRNA to human cells. LNPs containing either sgRNA (SEQ ID NOs: 3544-3566) or Cas9 mRNA are incubated with THP-1 monocytes, followed by validation of editing as described in Example 15. Upon confirmation of editing various functional assays as described in Example 13 will be performed.

### Example 22: In Vitro Delivery of IL6R-Editing Guide RNA to Human Cells Via Adeno-Associated Virus

[0795] Because all validation experiments are to be conducted via electroporation of cell cultures to introduce RNA-dependent nucleases and sgRNAs, additional experiments will assess the suitability of using adeno-associated virus (AAV) vectors to deliver sgRNA to human cells. Exemplary AAV vectors are shown in Table 2. After being prepared according to manufacturer specifications, such that one or more of the sgRNAs containing SEQ ID NOs: 3544-3566 are integrated into the viral vector, said vectors are introduced to human U2OS cells and editing is validated as previously described in Example 16. Upon confirmation of editing, various functional assays as described in Example 13 will be performed.

### Example 23: Validation of IL6ST Editing in Human Cells

[0796] Having designed and analyzed numerous sgRNA candidates that were predicted to edit the human IL6 Cytokine Family Signal Transducer protein to produce either a knockout or a dominant negative receptor (see FIG. 48D), the next step is to assess their ability to act in vitro. Of particular interest is whether the preferred (i.e., on-target) edit will be observed in edited cells.

[0797] To test this, 80 pmoles of sgRNA candidates (SEQ ID NOs: 3567-3606) are introduced into human THP-1 monocytes via electroporation as part of a ribonucleoprotein as previously described in Example 14.

[0798] It is anticipated that results of these studies will confirm the robustness of the in silico analysis and identify multiple candidates are indeed able to induce mutation in the IL6ST gene at high efficacy. It is further expected that use of AR-Cas9 will improve editing efficacy (i.e., increase on-target editing) as compared to wtCas9.

### Example 24: In Vitro Delivery of IL6ST-Editing Guide RNA to Human Cells Via Lipid Nanoparticles

[0799] Because all validation experiments are to be conducted via electroporation of cell cultures to introduce RNA-dependent nucleases and sgRNAs, additional experiments will assess the suitability of using lipid nanoparticle (LNP) to deliver mRNA to human cells. LNPs containing either sgRNA (SEQ ID NOs: 3567-3606) or Cas9 mRNA are incubated with THP-1 monocytes, followed by validation of editing as described in Example 15. Upon confirmation of editing various functional assays as described in Example 13 will be performed.

### Example 25: In Vitro Delivery of IL6ST-Editing Guide RNA to Human Cells Via Adeno-Associated Virus

[0800] Because all validation experiments are to be conducted via electroporation of cell cultures to introduce RNA-dependent nucleases and sgRNAs, additional experiments will assess the suitability of using adeno-associated virus (AAV) vectors to deliver sgRNA to human cells. Exemplary AAV vectors are shown in Table 2. After being prepared according to manufacturer specifications, such that one or more of the sgRNAs containing SEQ ID NOs: 3567-3606 are integrated into the viral vector, said vectors are introduced to human U20S cells and editing is validated as previously described in Example 16. Upon confirmation of editing, various functional assays as described in Example 13 will be performed.

### Example 26: Validation of TNFRSF1A Editing in Human Cells

[0801] Having designed and analyzed numerous sgRNA candidates that were predicted to edit the human Tumor Necrosis Factor Receptor 1 protein to produce either a knockout or a dominant negative receptor (see FIG. 48E), the next step is to assess their ability to act in vitro. Of particular interest is whether the preferred (i.e., on-target) edit will be observed in edited cells.

[0802] To test this, 80 pmoles of sgRNA candidates (SEQ ID NOs: 3607-3647) are introduced into human THP-1 monocytes via electroporation as part of a ribonucleoprotein as previously described in Example 14.

[0803] It is anticipated that results of these studies will confirm the robustness of the in silico analysis and identify multiple candidates are indeed able to induce mutation in the TNFRSF1A gene at high efficacy. It is further expected that use of AR-Cas9 will improve editing efficacy (i.e., increase on-target editing) as compared to wtCas9.

### Example 27: In Vitro Delivery of TNFRSF1A-Editing Guide RNA to Human Cells Via Lipid Nanoparticles

[0804] Because all validation experiments are to be conducted via electroporation of cell cultures to introduce RNA-dependent nucleases and sgRNAs, additional experiments will assess the suitability of using lipid nanoparticle (LNP) to deliver mRNA to human cells. LNPs containing either sgRNA (SEQ ID NOs: 3607-3647) or Cas9 mRNA are incubated with THP-1 monocytes, followed by validation of editing as described in Example 15. Upon confirmation of editing various functional assays as described in Example 13 will be performed.

### Example 28: In Vitro Delivery of TNFRSF1A-Editing Guide RNA to Human Cells Via Adeno-Associated Virus

[0805] Because all validation experiments are to be conducted via electroporation of cell cultures to introduce RNA-dependent nucleases and sgRNAs, additional experiments will assess the suitability of using adeno-associated virus (AAV) vectors to deliver sgRNA to human cells. Exemplary AAV vectors are shown in Table 2. After being prepared according to manufacturer specifications, such that one or more of the sgRNAs containing SEQ ID NOs: 3607-3647 are integrated into the viral vector, said vectors are introduced to human U2OS cells and editing is validated as previously described in Example 16. Upon confirmation of editing, various functional assays as described in Example 13 will be performed.

### Example 29: Validation of TNFRSF1B Editing in Human Cells

[0806] Having designed and analyzed numerous sgRNA candidates that were predicted to edit the human Tumor Necrosis Factor Receptor 2 protein to produce either a knockout or a dominant negative receptor (see FIG. 48F), the next step is to assess their ability to act in vitro. Of particular interest is whether the preferred (i.e., on-target) edit will be observed in edited cells.

[0807] To test this, 80 pmoles of sgRNA candidates (SEQ ID NOs: 3648-3692) are introduced into human THP-1 monocytes via electroporation as part of a ribonucleoprotein as previously described in Example 14.

[0808] It is anticipated that results of these studies will confirm the robustness of the in silico analysis and identify multiple candidates are indeed able to induce mutation in the TNFRSF1B gene at high efficacy. It is further expected that use of AR-Cas9 will improve editing efficacy (i.e., increase on-target editing) as compared to wtCas9.

### Example 30: In Vitro Delivery of TNFRSF1B-Editing Guide RNA to Human Cells Via Lipid Nanoparticles

[0809] Because all validation experiments are to be conducted via electroporation of cell cultures to introduce RNA-dependent nucleases and sgRNAs, additional experiments will assess the suitability of using lipid nanoparticle (LNP) to deliver mRNA to human cells. LNPs containing either sgRNA (SEQ ID NOs: 3648-3692) or Cas9 mRNA are incubated with THP-1 monocytes, followed by validation of editing as described in Example 15. Upon confirmation of editing various functional assays as described in Example 13 will be performed.

### Example 31: In Vitro Delivery of TNFRSF1B-Editing Guide RNA to Human Cells Via Adeno-Associated Virus

[0810] Because all validation experiments are to be conducted via electroporation of cell cultures to introduce RNA-dependent nucleases and sgRNAs, additional experiments will assess the suitability of using adeno-associated virus (AAV) vectors to deliver sgRNA to human cells. Exemplary AAV vectors are shown in Table 2. After being prepared according to manufacturer specifications, such that one or more of the sgRNAs containing SEQ ID NOs: 3648-3692 are integrated into the viral vector, said vectors are introduced to human U2OS cells and editing is validated as previously described in Example 16. Upon confirmation of editing, various functional assays as described in Example 13 will be performed.

### Example 32: Validation of TNFRSF3 Editing in Human Cells

[0811] Having designed and analyzed numerous sgRNA candidates that were predicted to edit the human Lymphotoxin Beta Receptor protein to produce either a knockout or a dominant negative receptor (see FIG. 48G), the next step is to assess their ability to act in vitro. Of particular interest is whether the preferred (i.e., on-target) edit will be observed in edited cells.

[0812] To test this, 80 pmoles of sgRNA candidates (SEQ ID NOs: 3693-3713) are introduced into human THP-1 monocytes via electroporation as part of a ribonucleoprotein as previously described in Example 14.

[0813] It is anticipated that results of these studies will confirm the robustness of the in silico analysis and identify multiple candidates are indeed able to induce mutation in the TNFRSF3 gene at high efficacy. It is further expected that use of AR-Cas9 will improve editing efficacy (i.e., increase on-target editing) as compared to wtCas9.

### Example 33: In Vitro Delivery of TNFRSF3-Editing Guide RNA to Human Cells Via Lipid Nanoparticles

[0814] Because all validation experiments are to be conducted via electroporation of cell cultures to introduce RNA-dependent nucleases and sgRNAs, additional experiments will assess the suitability of using lipid nanoparticle (LNP) to deliver mRNA to human cells. LNPs containing either sgRNA (SEQ ID NOs: 3693-3713) or Cas9 mRNA are incubated with THP-1 monocytes, followed by validation of editing as described in Example 15. Upon confirmation of editing various functional assays as described in Example 13 will be performed.

### Example 34: In Vitro Delivery of TNFRSF3-Editing Guide RNA to Human Cells Via Adeno-Associated Virus

[0815] Because all validation experiments are to be conducted via electroporation of cell cultures to introduce RNA-dependent nucleases and sgRNAs, additional experiments will assess the suitability of using adeno-associated virus (AAV) vectors to deliver sgRNA to human cells. Exemplary AAV vectors are shown in Table 2. After being prepared according to manufacturer specifications, such that one or more of the sgRNAs containing SEQ ID NOs: 3693-3713 are integrated into the viral vector, said vectors are introduced to human U2OS cells and editing is validated as previously described in Example 16. Upon confirmation of editing, various functional assays as described in Example 13 will be performed.

### Example 35: Validation of TNFRSF4 Editing in Human Cells

[0816] Having designed and analyzed numerous sgRNA candidates that were predicted to edit the human OX40 Receptor protein to produce either a knockout or a dominant negative receptor (see FIG. 48H), the next step is to assess their ability to act in vitro. Of particular interest is whether the preferred (i.e., on-target) edit will be observed in edited cells.

[0817] To test this, 80 pmoles of sgRNA candidates (SEQ ID NOs: 3714-3740) are introduced into human THP-1 monocytes via electroporation as part of a ribonucleoprotein as previously described in Example 14.

[0818] It is anticipated that results of these studies will confirm the robustness of the in silico analysis and identify multiple candidates are indeed able to induce mutation in the TNFRSF4 gene at high efficacy. It is further expected that use of AR-Cas9 will improve editing efficacy (i.e., increase on-target editing) as compared to wtCas9.

### Example 36: In Vitro Delivery of TNFRSF4-Editing Guide RNA to Human Cells Via Lipid Nanoparticles

[0819] Because all validation experiments are to be conducted via electroporation of cell cultures to introduce RNA-dependent nucleases and sgRNAs, additional experiments will assess the suitability of using lipid nanoparticle (LNP) to deliver mRNA to human cells. LNPs containing either sgRNA (SEQ ID NOs: 3714-3740) or Cas9 mRNA are incubated with THP-1 monocytes, followed by validation of editing as described in Example 15. Upon confirmation of editing various functional assays as described in Example 13 will be performed.

### Example 37: In Vitro Delivery of TNFRSF4-Editing Guide RNA to Human Cells Via Adeno-Associated Virus

[0820] Because all validation experiments are to be conducted via electroporation of cell cultures to introduce RNA-dependent nucleases and sgRNAs, additional experiments will assess the suitability of using adeno-associated virus (AAV) vectors to deliver sgRNA to human cells. Exemplary AAV vectors are shown in Table 2. After being prepared according to manufacturer specifications, such that one or more of the sgRNAs containing SEQ ID NOs: 3714-3740 are integrated into the viral vector, said vectors are introduced to human U20S cells and editing is validated as previously described in Example 16. Upon confirmation of editing, various functional assays as described in Example 13 will be performed.

### Example 38: Validation of TNFRSF11A Editing in Human Cells

[0821] Having designed and analyzed numerous sgRNA candidates that were predicted to edit the human Tumor Necrosis Factor Receptor Superfamily Member 11A protein to produce either a knockout or a dominant negative receptor (see FIG. 48I), the next step is to assess their ability to act in vitro. Of particular interest is whether the preferred (i.e., on-target) edit will be observed in edited cells.

[0822] To test this, 80 pmoles of sgRNA candidates (SEQ ID NOs: 3741-3788) are introduced into human THP-1 monocytes via electroporation as part of a ribonucleoprotein as previously described in Example 14.

[0823] It is anticipated that results of these studies will confirm the robustness of the in silico analysis and identify multiple candidates are indeed able to induce mutation in the TNFRSF11A gene at high efficacy. It is further expected that use of AR-Cas9 will improve editing efficacy (i.e., increase on-target editing) as compared to wtCas9.

### Example 39: In Vitro Delivery of TNFRSF11A-Editing Guide RNA to Human Cells Via Lipid Nanoparticles

[0824] Because all validation experiments are to be conducted via electroporation of cell cultures to introduce RNA-dependent nucleases and sgRNAs, additional experiments will assess the suitability of using lipid nanoparticle (LNP) to deliver mRNA to human cells. LNPs containing either sgRNA (SEQ ID NOs: 3741-3788) or Cas9 mRNA are incubated with THP-1 monocytes, followed by validation of editing as described in Example 15. Upon confirmation of editing various functional assays as described in Example 13 will be performed.

### Example 40: In Vitro Delivery of TNFRSF11A-Editing Guide RNA to Human Cells Via Adeno-Associated Virus

[0825] Because all validation experiments are to be conducted via electroporation of cell cultures to introduce RNA-dependent nucleases and sgRNAs, additional experiments will assess the suitability of using adeno-associated virus (AAV) vectors to deliver sgRNA to human cells. Exemplary AAV vectors are shown in Table 2. After being prepared according to manufacturer specifications, such that one or more of the sgRNAs containing SEQ ID NOs: 3741-3788 are integrated into the viral vector, said vectors are introduced to human U2OS cells and editing is validated as previously described in Example 16. Upon confirmation of editing, various functional assays as described in Example 13 will be performed.

### Example 41: Validation of TGFBR1 Editing in Human Cells

[0826] Having designed and analyzed numerous sgRNA candidates that were predicted to edit the human Transforming Growth Factor Beta Receptor 1 protein to produce either a knockout or a dominant negative receptor (see FIG. 48J), the next step is to assess their ability to act in vitro. Of particular interest is whether the preferred (i.e., on-target) edit will be observed in edited cells.

[0827] To test this, 80 pmoles of sgRNA candidates (SEQ ID NOs: 3789-3813) are introduced into human THP-1 monocytes via electroporation as part of a ribonucleoprotein as previously described in Example 14.

[0828] It is anticipated that results of these studies will confirm the robustness of the in silico analysis and identify multiple candidates are indeed able to induce mutation in the TGFBR1 gene at high efficacy. It is further expected that use of AR-Cas9 will improve editing efficacy (i.e., increase on-target editing) as compared to wtCas9.

### Example 42: In Vitro Delivery of TGFBR1-Editing Guide RNA to Human Cells Via Lipid Nanoparticles

[0829] Because all validation experiments are to be conducted via electroporation of cell cultures to introduce RNA-dependent nucleases and sgRNAs, additional experiments will assess the suitability of using lipid nanoparticle (LNP) to deliver mRNA to human cells. LNPs containing either sgRNA (SEQ ID NOs: 3789-3813) or Cas9 mRNA are incubated with THP-1 monocytes, followed by validation of editing as described in Example 15. Upon confirmation of editing various functional assays as described in Example 13 will be performed.

### Example 43: In Vitro Delivery of TGFBR1-Editing Guide RNA to Human Cells Via Adeno-Associated Virus

[0830] Because all validation experiments are to be conducted via electroporation of cell cultures to introduce RNA-dependent nucleases and sgRNAs, additional experiments will assess the suitability of using adeno-associated virus (AAV) vectors to deliver sgRNA to human cells. Exemplary AAV vectors are shown in Table 2. After being prepared according to manufacturer specifications, such that one or more of the sgRNAs containing SEQ ID NOs: 3789-3813 are integrated into the viral vector, said vectors are introduced to human U2OS cells and editing is validated as previously described in Example 16. Upon confirmation of editing, various functional assays as described in Example 13 will be performed.

### Example 44: Validation of TGFBR2 Editing in Human Cells

[0831] Having designed and analyzed numerous sgRNA candidates that were predicted to edit the human Transforming Growth Factor Beta Receptor 2 protein to produce either a knockout or a dominant negative receptor (see FIG. 48K), the next step is to assess their ability to act in vitro. Of particular interest is whether the preferred (i.e., on-target) edit will be observed in edited cells.

[0832] To test this, 80 pmoles of sgRNA candidates (SEQ ID NOs: 3814-3865) are introduced into human THP-1 monocytes via electroporation as part of a ribonucleoprotein as previously described in Example 14.

[0833] It is anticipated that results of these studies will confirm the robustness of the in silico analysis and identify multiple candidates are indeed able to induce mutation in the TGFBR2 gene at high efficacy. It is further expected that use of AR-Cas9 will improve editing efficacy (i.e., increase on-target editing) as compared to wtCas9.

### Example 45: In Vitro Delivery of TGFBR2-Editing Guide RNA to Human Cells Via Lipid Nanoparticles

[0834] Because all validation experiments are to be conducted via electroporation of cell cultures to introduce RNA-dependent nucleases and sgRNAs, additional experiments will assess the suitability of using lipid nanoparticle (LNP) to deliver mRNA to human cells. LNPs containing either sgRNA (SEQ ID NOs: 3814-3865) or Cas9 mRNA are incubated with THP-1 monocytes, followed by validation of editing as described in Example 15. Upon confirmation of editing various functional assays as described in Example 13 will be performed.

### Example 46: In Vitro Delivery of TGFBR2-Editing Guide RNA to Human Cells Via Adeno-Associated Virus

[0835] Because all validation experiments are to be conducted via electroporation of cell cultures to introduce RNA-dependent nucleases and sgRNAs, additional experiments will assess the suitability of using adeno-associated virus (AAV) vectors to deliver sgRNA to human cells. Exemplary AAV vectors are shown in Table 2. After being prepared according to manufacturer specifications, such that one or more of the sgRNAs containing SEQ ID NOs: 3814-3865 are integrated into the viral vector, said vectors are introduced to human U2OS cells and editing is validated as previously described in Example 16. Upon confirmation of editing, various functional assays as described in Example 13 will be performed.

[0836] The examples set forth above are provided to give those of ordinary skill in the art a complete disclosure and description of how to make and use the embodiments of the compositions, systems and methods of the disclosure, and are not intended to limit the scope of what the inventors regard as their invention. Modifications of the above-described modes for carrying out the embodiments of the disclosure that are obvious to persons of skill in the art are intended to be within the scope of the following claims. All patents and publications mentioned in the specification are indicative of the levels of skill of those skilled in the art to which the disclosure pertains.

[0837] All headings and section designations are used for clarity and reference purposes only and are not to be considered limiting in any way. For example, those of skill in the art will appreciate the usefulness of combining various aspects from different headings and sections as appropriate according to the spirit and scope of the disclosure described herein.

[0838] It is to be understood that the methods described herein are not limited to the particular methodology, protocols, subjects, and sequencing techniques described herein and as such can vary. It is also to be understood that the terminology used herein is for the purpose of describing particular embodiments only, and is not intended to limit the scope of the methods and compositions described herein, which will be limited only by the appended claims. While some embodiments of the present disclosure have been shown and described herein, it will be obvious to those skilled in the art that such embodiments are provided by way of example only. Numerous variations, changes, and substitutions will now occur to those skilled in the art without departing from the disclosure. It should be understood that various alternatives to the embodiments of the disclosure described herein can be employed in practicing the disclosure. It is intended that the following claims define the scope of the disclosure and that methods and structures within the scope of these claims and their equivalents be covered thereby.

[0839] The examples set forth above are provided to give those of ordinary skill in the art a complete disclosure and description of how to make and use the embodiments of the compositions, systems and methods of the disclosure, and are not intended to limit the scope of what the inventors regard as their invention. Modifications of the above-described modes for carrying out the embodiments of the disclosure that are obvious to persons of skill in the art are intended to be within the scope of the following claims. All patents and publications mentioned in the specification are indicative of the levels of skill of those skilled in the art to which the disclosure pertains.

[0840] All headings and section designations are used for clarity and reference purposes only and are not to be considered limiting in any way. For example, those of skill in the art will appreciate the usefulness of combining various aspects from different headings and sections as appropriate according to the spirit and scope of the disclosure described herein.

[0841] It is to be understood that the methods described herein are not limited to the particular methodology, protocols, subjects, and sequencing techniques described herein and as such can vary. It is also to be understood that the terminology used herein is for the purpose of describing particular embodiments only, and is not intended to limit the scope of the methods and compositions described herein, which will be limited only by the appended claims. While some embodiments of the present disclosure have been shown and described herein, it will be obvious to those skilled in the art that such embodiments are provided by way of example only. Numerous variations, changes, and substitutions will now occur to those skilled in the art without departing from the disclosure. It should be understood that various alternatives to the embodiments of the disclosure described herein can be employed in practicing the disclosure. It is intended that the following claims define the scope of the disclosure and that methods and structures within the scope of these claims and their equivalents be covered thereby.

[0842] Several aspects are described with reference to example applications for illustration. Unless otherwise indicated, any embodiment can be combined with any other embodiment. It should be understood that numerous specific details, relationships, and methods are set forth to provide a full understanding of the features described herein. A skilled artisan, however, will readily recognize that the features described herein can be practiced without one or more of the specific details or with other methods. The features described herein are not limited by the illustrated ordering of acts or events, as some acts can occur in different orders and/or concurrently with other acts or events. Furthermore, not all illustrated acts or events are required to implement a methodology in accordance with the features described herein.

[0843] While some embodiments have been shown and described herein, it will be obvious to those skilled in the art that such embodiments are provided by way of example only. It is not intended that the disclosure be limited by the specific examples provided within the specification. While the disclosure has been described with reference to the aforementioned specification, the descriptions and illustrations of the embodiments herein are not meant to be construed in a limiting sense. Numerous variations, changes, and substitutions will now occur to those skilled in the art without departing from the disclosure.

[0844] Furthermore, it shall be understood that all aspects of the disclosure are not limited to the specific depictions, configurations or relative proportions set forth herein which depend upon a variety of conditions and variables. It should be understood that various alternatives to the embodiments of the disclosure described herein can be employed in practicing the disclosure. It is therefore contemplated that the disclosure shall also cover any such alternatives, modifications, variations or equivalents. It is intended that the following claims define the scope of the disclosure and that methods and structures within the scope of these claims and their equivalents be covered thereby.

[0845] All publications, patents, and patent applications herein are incorporated by reference to the same extent as if each individual publication, patent, or patent application was specifically and individually indicated to be incorporated by reference. In the event of a conflict between a term herein and a term in an incorporated reference, the term herein controls.

The application's sequence listing, which the Patent Office published only in electronic form, follows.

SEQUENCE LISTING (3186 sequences)

SEQ ID NO: 1 - RNA, 20 nt, synthetic construct
  ncRNA 1..20: ncRNA_class = sgRNA
  source 1..20: mol_type = other RNA
cttaacccaaatgaacacaa

SEQ ID NO: 2 - RNA, 20 nt, synthetic construct
  source 1..20: mol_type = other RNA
  ncRNA 1..20: ncRNA_class = sgRNA
gaggcttgttctgtagatac

SEQ ID NO: 3 - RNA, 20 nt, synthetic construct
  source 1..20: mol_type = other RNA
  ncRNA 1..20: ncRNA_class = sgRNA
atgtggctgaaaagcataga

SEQ ID NO: 4 - RNA, 20 nt, synthetic construct
  source 1..20: mol_type = other RNA
  ncRNA 1..20: ncRNA_class = sgRNA
ttggtttgttcctgctaagg

SEQ ID NO: 5 - RNA, 20 nt, synthetic construct
  source 1..20: mol_type = other RNA
  ncRNA 1..20: ncRNA_class = sgRNA
ttcaggacattactattgcg

SEQ ID NO: 6 - RNA, 20 nt, synthetic construct
  source 1..20: mol_type = other RNA
  ncRNA 1..20: ncRNA_class = sgRNA
aagcagaaactacccgttgc

SEQ ID NO: 7 - RNA, 20 nt, synthetic construct
  source 1..20: mol_type = other RNA
  ncRNA 1..20: ncRNA_class = sgRNA
taggctcatcgtgatgaatg

SEQ ID NO: 8 - RNA, 20 nt, synthetic construct
  source 1..20: mol_type = other RNA
  ncRNA 1..20: ncRNA_class = sgRNA
aatgtggctgaaaagcatag

SEQ ID NO: 9 - RNA, 20 nt, synthetic construct
  source 1..20: mol_type = other RNA
  ncRNA 1..20: ncRNA_class = sgRNA
catgcatcctacacatactt

SEQ ID NO: 10 - RNA, 20 nt, synthetic construct
  source 1..20: mol_type = other RNA
  ncRNA 1..20: ncRNA_class = sgRNA
gcaagcaatatcctattacc

SEQ ID NO: 11 - RNA, 20 nt, synthetic construct
  source 1..20: mol_type = other RNA
  ncRNA 1..20: ncRNA_class = sgRNA
caagcaatatcctattaccc

SEQ ID NO: 12 - RNA, 20 nt, synthetic construct
  source 1..20: mol_type = other RNA
  ncRNA 1..20: ncRNA_class = sgRNA
gagcccagctaatgagacaa

SEQ ID NO: 13 - RNA, 20 nt, synthetic construct
  source 1..20: mol_type = other RNA
  ncRNA 1..20: ncRNA_class = sgRNA
agcaatgtcactcaactggc

SEQ ID NO: 14 - RNA, 20 nt, synthetic construct
  source 1..20: mol_type = other RNA
  ncRNA 1..20: ncRNA_class = sgRNA
gagacaatggaagtagactt

SEQ ID NO: 15 - RNA, 20 nt, synthetic construct
  source 1..20: mol_type = other RNA
  ncRNA 1..20: ncRNA_class = sgRNA
tttgtgttgatgaatcctgg

SEQ ID NO: 16 - RNA, 20 nt, synthetic construct
  source 1..20: mol_type = other RNA
  ncRNA 1..20: ncRNA_class = sgRNA
ttgcttgcccaagtatgtgt

SEQ ID NO: 17 - RNA, 20 nt, synthetic construct
  source 1..20: mol_type = other RNA
  ncRNA 1..20: ncRNA_class = sgRNA
aatagtcttcccctagcact

SEQ ID NO: 18 - RNA, 20 nt, synthetic construct
  source 1..20: mol_type = other RNA
  ncRNA 1..20: ncRNA_class = sgRNA
atgagttacctaaattacag

SEQ ID NO: 19 - RNA, 20 nt, synthetic construct
  source 1..20: mol_type = other RNA
  ncRNA 1..20: ncRNA_class = sgRNA
acctaaattacagtggtata

SEQ ID NO: 20 - RNA, 20 nt, synthetic construct
  source 1..20: mol_type = other RNA
  ncRNA 1..20: ncRNA_class = sgRNA
actttagtggagtcaaagat

SEQ ID NO: 21 - RNA, 20 nt, synthetic construct
  source 1..20: mol_type = other RNA
  ncRNA 1..20: ncRNA_class = sgRNA
caattgatctgtaatgtcac

SEQ ID NO: 22 - RNA, 20 nt, synthetic construct
  source 1..20: mol_type = other RNA
  ncRNA 1..20: ncRNA_class = sgRNA
ctacccgttgcaggagacgg

SEQ ID NO: 23 - RNA, 20 nt, synthetic construct
  source 1..20: mol_type = other RNA
  ncRNA 1..20: ncRNA_class = sgRNA
agtaataaattctattaccc

SEQ ID NO: 24 - RNA, 20 nt, synthetic construct
  source 1..20: mol_type = other RNA
  ncRNA 1..20: ncRNA_class = sgRNA
agtaagcaatgtcactcaac

SEQ ID NO: 25 - RNA, 20 nt, synthetic construct
  source 1..20: mol_type = other RNA
  ncRNA 1..20: ncRNA_class = sgRNA
gatgaagatgacccagtgct

SEQ ID NO: 26 - RNA, 20 nt, synthetic construct
  source 1..20: mol_type = other RNA
  ncRNA 1..20: ncRNA_class = sgRNA
tcatttgggttaagaggaca

SEQ ID NO: 27 - RNA, 20 nt, synthetic construct
  source 1..20: mol_type = other RNA
  ncRNA 1..20: ncRNA_class = sgRNA
ttgtgttcatttgggttaag

SEQ ID NO: 28 - RNA, 20 nt, synthetic construct
  source 1..20: mol_type = other RNA
  ncRNA 1..20: ncRNA_class = sgRNA
cctgctaaggtggaggattc

SEQ ID NO: 29 - RNA, 20 nt, synthetic construct
  source 1..20: mol_type = other RNA
  ncRNA 1..20: ncRNA_class = sgRNA
gacattactattgcgtggta

SEQ ID NO: 30 - RNA, 20 nt, synthetic construct
  source 1..20: mol_type = other RNA
  ncRNA 1..20: ncRNA_class = sgRNA
agtcctccgtctcctgcaac

SEQ ID NO: 31 - RNA, 20 nt, synthetic construct
  source 1..20: mol_type = other RNA
  ncRNA 1..20: ncRNA_class = sgRNA
aagtcctccgtctcctgcaa

SEQ ID NO: 32 - RNA, 20 nt, synthetic construct
  source 1..20: mol_type = other RNA
  ncRNA 1..20: ncRNA_class = sgRNA
ttagctgggctcacaatcac

SEQ ID NO: 33 - RNA, 20 nt, synthetic construct
  source 1..20: mol_type = other RNA
  ncRNA 1..20: ncRNA_class = sgRNA
cctgaatcctccaccttagc

SEQ ID NO: 34 - RNA, 20 nt, synthetic construct
  source 1..20: mol_type = other RNA
  ncRNA 1..20: ncRNA_class = sgRNA
tgtgcattataacataagtt

SEQ ID NO: 35 - RNA, 20 nt, synthetic construct
  source 1..20: mol_type = other RNA
  ncRNA 1..20: ncRNA_class = sgRNA
aggacttgtgtgcccttata

SEQ ID NO: 36 - RNA, 20 nt, synthetic construct
  source 1..20: mol_type = other RNA
  ncRNA 1..20: ncRNA_class = sgRNA
tcatgcatcctacacatact

SEQ ID NO: 37 - RNA, 20 nt, synthetic construct
  source 1..20: mol_type = other RNA
  ncRNA 1..20: ncRNA_class = sgRNA
atgtgtattcttggcaaaac

SEQ ID NO: 38 - RNA, 20 nt, synthetic construct
  source 1..20: mol_type = other RNA
  ncRNA 1..20: ncRNA_class = sgRNA
tctactgatttcttctctgg

SEQ ID NO: 39 - RNA, 20 nt, synthetic construct
  source 1..20: mol_type = other RNA
  ncRNA 1..20: ncRNA_class = sgRNA
ctctttgtgttgatgaatcc

SEQ ID NO: 40 - RNA, 20 nt, synthetic construct
  source 1..20: mol_type = other RNA
  ncRNA 1..20: ncRNA_class = sgRNA
gtttgttcctgctaaggtgg

SEQ ID NO: 41 - RNA, 20 nt, synthetic construct
  source 1..20: mol_type = other RNA
  ncRNA 1..20: ncRNA_class = sgRNA
aattctattacccgggtaat

SEQ ID NO: 42 - RNA, 20 nt, synthetic construct
  source 1..20: mol_type = other RNA
  ncRNA 1..20: ncRNA_class = sgRNA
ctcacaatcacaggccttgt

SEQ ID NO: 43 - RNA, 20 nt, synthetic construct
  source 1..20: mol_type = other RNA
  ncRNA 1..20: ncRNA_class = sgRNA
agttgagtgacattgcttac

SEQ ID NO: 44 - RNA, 20 nt, synthetic construct
  source 1..20: mol_type = other RNA
  ncRNA 1..20: ncRNA_class = sgRNA
atgaagatgacccagtgcta

SEQ ID NO: 45 - RNA, 20 nt, synthetic construct
  source 1..20: mol_type = other RNA
  ncRNA 1..20: ncRNA_class = sgRNA
tgaagatgacccagtgctag

SEQ ID NO: 46 - RNA, 20 nt, synthetic construct
  source 1..20: mol_type = other RNA
  ncRNA 1..20: ncRNA_class = sgRNA
aacacaaaggcactataact

SEQ ID NO: 47 - RNA, 20 nt, synthetic construct
  source 1..20: mol_type = other RNA
  ncRNA 1..20: ncRNA_class = sgRNA
tatctacagaacaagcctcc

SEQ ID NO: 48 - RNA, 20 nt, synthetic construct
  source 1..20: mol_type = other RNA
  ncRNA 1..20: ncRNA_class = sgRNA
gggtagtttctgcttaaata

SEQ ID NO: 49 - RNA, 20 nt, synthetic construct
  source 1..20: mol_type = other RNA
  ncRNA 1..20: ncRNA_class = sgRNA
cttgacaatatacactttag

SEQ ID NO: 50 - RNA, 20 nt, synthetic construct
  source 1..20: mol_type = other RNA
  ncRNA 1..20: ncRNA_class = sgRNA
gagtaataaattctattacc

SEQ ID NO: 51 - RNA, 20 nt, synthetic construct
  source 1..20: mol_type = other RNA
  ncRNA 1..20: ncRNA_class = sgRNA
cttccattgtctcattagct

SEQ ID NO: 52 - RNA, 20 nt, synthetic construct
  source 1..20: mol_type = other RNA
  ncRNA 1..20: ncRNA_class = sgRNA
attacagatcaattgtatct

SEQ ID NO: 53 - RNA, 20 nt, synthetic construct
  source 1..20: mol_type = other RNA
  ncRNA 1..20: ncRNA_class = sgRNA
tatattaagcactgtgatga

SEQ ID NO: 54 - RNA, 20 nt, synthetic construct
  source 1..20: mol_type = other RNA
  ncRNA 1..20: ncRNA_class = sgRNA
ttcttggcaaaacaggtaaa

SEQ ID NO: 55 - RNA, 20 nt, synthetic construct
  source 1..20: mol_type = other RNA
  ncRNA 1..20: ncRNA_class = sgRNA
tgagacaatggaagtagact

SEQ ID NO: 56 - RNA, 20 nt, synthetic construct
  source 1..20: mol_type = other RNA
  ncRNA 1..20: ncRNA_class = sgRNA
gctcacaatcacaggccttg

SEQ ID NO: 57 - RNA, 20 nt, synthetic construct
  source 1..20: mol_type = other RNA
  ncRNA 1..20: ncRNA_class = sgRNA
tgctaggggaagactattac

SEQ ID NO: 58 - RNA, 20 nt, synthetic construct
  source 1..20: mol_type = other RNA
  ncRNA 1..20: ncRNA_class = sgRNA
aaaatcctgcaaacaaaaga

SEQ ID NO: 59 - RNA, 20 nt, synthetic construct
  source 1..20: mol_type = other RNA
  ncRNA 1..20: ncRNA_class = sgRNA
catcacagtgcttaatatat

SEQ ID NO: 60 - RNA, 20 nt, synthetic construct
  source 1..20: mol_type = other RNA
  ncRNA 1..20: ncRNA_class = sgRNA
atctataccatgtgtattct

SEQ ID NO: 61 - RNA, 20 nt, synthetic construct
  source 1..20: mol_type = other RNA
  ncRNA 1..20: ncRNA_class = sgRNA
actttggtttgttcctgcta

SEQ ID NO: 62 - RNA, 20 nt, synthetic construct
  source 1..20: mol_type = other RNA
  ncRNA 1..20: ncRNA_class = sgRNA
ttgcacttattttaattctg

SEQ ID NO: 63 - RNA, 20 nt, synthetic construct
  source 1..20: mol_type = other RNA
  ncRNA 1..20: ncRNA_class = sgRNA
ttgcttactggaagtggaat

SEQ ID NO: 64 - RNA, 20 nt, synthetic construct
  source 1..20: mol_type = other RNA
  ncRNA 1..20: ncRNA_class = sgRNA
taatagtcttcccctagcac

SEQ ID NO: 65 - RNA, 20 nt, synthetic construct
  source 1..20: mol_type = other RNA
  ncRNA 1..20: ncRNA_class = sgRNA
aaactacccgttgcaggaga

SEQ ID NO: 66 - RNA, 20 nt, synthetic construct
  source 1..20: mol_type = other RNA
  ncRNA 1..20: ncRNA_class = sgRNA
gtaatagaatttattactct

SEQ ID NO: 67 - RNA, 20 nt, synthetic construct
  source 1..20: mol_type = other RNA
  ncRNA 1..20: ncRNA_class = sgRNA
acttccattgtctcattagc

SEQ ID NO: 68 - RNA, 20 nt, synthetic construct
  source 1..20: mol_type = other RNA
  ncRNA 1..20: ncRNA_class = sgRNA
attgcttactggaagtggaa

SEQ ID NO: 69 - RNA, 20 nt, synthetic construct
  source 1..20: mol_type = other RNA
  ncRNA 1..20: ncRNA_class = sgRNA
ctgatttcttctctggaggc

SEQ ID NO: 70 - RNA, 20 nt, synthetic construct
  source 1..20: mol_type = other RNA
  ncRNA 1..20: ncRNA_class = sgRNA
ttcatttgggttaagaggac

SEQ ID NO: 71 - RNA, 20 nt, synthetic construct
  source 1..20: mol_type = other RNA
  ncRNA 1..20: ncRNA_class = sgRNA
cattacagatcaattgtatc

SEQ ID NO: 72 - RNA, 20 nt, synthetic construct
  source 1..20: mol_type = other RNA
  ncRNA 1..20: ncRNA_class = sgRNA
gtgacattgcttactggaag

SEQ ID NO: 73 - RNA, 20 nt, synthetic construct
  source 1..20: mol_type = other RNA
  ncRNA 1..20: ncRNA_class = sgRNA
atatattaagcactgtgatg

SEQ ID NO: 74 - RNA, 20 nt, synthetic construct
  source 1..20: mol_type = other RNA
  ncRNA 1..20: ncRNA_class = sgRNA
tgtatattgtcaagaagtag

SEQ ID NO: 75 - RNA, 20 nt, synthetic construct
  source 1..20: mol_type = other RNA
  ncRNA 1..20: ncRNA_class = sgRNA
gtactccttcttttgtttgc

SEQ ID NO: 76 - RNA, 20 nt, synthetic construct
  source 1..20: mol_type = other RNA
  ncRNA 1..20: ncRNA_class = sgRNA
agctctactgatttcttctc

SEQ ID NO: 77 - RNA, 20 nt, synthetic construct
  source 1..20: mol_type = other RNA
  ncRNA 1..20: ncRNA_class = sgRNA
taaaataagtgcaaaatttg

SEQ ID NO: 78 - RNA, 20 nt, synthetic construct
  source 1..20: mol_type = other RNA
  ncRNA 1..20: ncRNA_class = sgRNA
accttataccactgtaattt

SEQ ID NO: 79 - RNA, 20 nt, synthetic construct
  source 1..20: mol_type = other RNA
  ncRNA 1..20: ncRNA_class = sgRNA
tgttttgccaagaatacaca

SEQ ID NO: 80 - RNA, 20 nt, synthetic construct
  source 1..20: mol_type = other RNA
  ncRNA 1..20: ncRNA_class = sgRNA
tggaagggatgactacgttg

SEQ ID NO: 81 - RNA, 20 nt, synthetic construct
  source 1..20: mol_type = other RNA
  ncRNA 1..20: ncRNA_class = sgRNA
agggatgactacgttgggga

SEQ ID NO: 82 - RNA, 20 nt, synthetic construct
  source 1..20: mol_type = other RNA
  ncRNA 1..20: ncRNA_class = sgRNA
acatcaggcttcagctggct

SEQ ID NO: 83 - RNA, 20 nt, synthetic construct
  source 1..20: mol_type = other RNA
  ncRNA 1..20: ncRNA_class = sgRNA
ctgaacaagagcattataca

SEQ ID NO: 84 - RNA, 20 nt, synthetic construct
  source 1..20: mol_type = other RNA
  ncRNA 1..20: ncRNA_class = sgRNA
gtgtaaagtcccctgaccag

SEQ ID NO: 85 - RNA, 20 nt, synthetic construct
  source 1..20: mol_type = other RNA
  ncRNA 1..20: ncRNA_class = sgRNA
atggggctatccgctggtca

SEQ ID NO: 86 - RNA, 20 nt, synthetic construct
  source 1..20: mol_type = other RNA
  ncRNA 1..20: ncRNA_class = sgRNA
tggggctatccgctggtcag

SEQ ID NO: 87 - RNA, 20 nt, synthetic construct
  source 1..20: mol_type = other RNA
  ncRNA 1..20: ncRNA_class = sgRNA
ctggtcaggggactttacac

SEQ ID NO: 88 - RNA, 20 nt, synthetic construct
  source 1..20: mol_type = other RNA
  ncRNA 1..20: ncRNA_class = sgRNA
tggtcaggggactttacaca

SEQ ID NO: 89 - RNA, 20 nt, synthetic construct
  source 1..20: mol_type = other RNA
  ncRNA 1..20: ncRNA_class = sgRNA
gaggtcttggaaaaacagtg

SEQ ID NO: 90 - RNA, 20 nt, synthetic construct
  source 1..20: mol_type = other RNA
  ncRNA 1..20: ncRNA_class = sgRNA
atacagtatatatgcgtcat

SEQ ID NO: 91 - RNA, 20 nt, synthetic construct
  source 1..20: mol_type = other RNA
  ncRNA 1..20: ncRNA_class = sgRNA
actgtatccaaagactgttg

SEQ ID NO: 92 - RNA, 20 nt, synthetic construct
  source 1..20: mol_type = other RNA
  ncRNA 1..20: ncRNA_class = sgRNA
tatggaagggatgactacgt

SEQ ID NO: 93 - RNA, 20 nt, synthetic construct
  source 1..20: mol_type = other RNA
  ncRNA 1..20: ncRNA_class = sgRNA
aaccttgtctttgcagactg

SEQ ID NO: 94 - RNA, 20 nt, synthetic construct
  source 1..20: mol_type = other RNA
  ncRNA 1..20: ncRNA_class = sgRNA
tgacattgtgctttggtaca

SEQ ID NO: 95 - RNA, 20 nt, synthetic construct
  source 1..20: mol_type = other RNA
  ncRNA 1..20: ncRNA_class = sgRNA
atggaagggatgactacgtt

SEQ ID NO: 96 - RNA, 20 nt, synthetic construct
  source 1..20: mol_type = other RNA
  ncRNA 1..20: ncRNA_class = sgRNA
agaaacatggggctatccgc

SEQ ID NO: 97 - RNA, 20 nt, synthetic construct
  source 1..20: mol_type = other RNA
  ncRNA 1..20: ncRNA_class = sgRNA
tcaggcttcagctggctggg

SEQ ID NO: 98 - RNA, 20 nt, synthetic construct
  source 1..20: mol_type = other RNA
  ncRNA 1..20: ncRNA_class = sgRNA
tattgggagaaaatcatagc

SEQ ID NO: 99 - RNA, 20 nt, synthetic construct
  source 1..20: mol_type = other RNA
  ncRNA 1..20: ncRNA_class = sgRNA
tactgtatccaaagactgtt

SEQ ID NO: 100 - RNA, 20 nt, synthetic construct
  source 1..20: mol_type = other RNA
  ncRNA 1..20: ncRNA_class = sgRNA
tatccaaagactgttgggga

SEQ ID NO: 101 - RNA, 20 nt, synthetic construct
  source 1..20: mol_type = other RNA
  ncRNA 1..20: ncRNA_class = sgRNA
cacaaaaatatcacagtcag

SEQ ID NO: 102 - RNA, 20 nt, synthetic construct
  source 1..20: mol_type = other RNA
  ncRNA 1..20: ncRNA_class = sgRNA
aacatcaggcttcagctggc

SEQ ID NO: 103 - RNA, 20 nt, synthetic construct
  source 1..20: mol_type = other RNA
  ncRNA 1..20: ncRNA_class = sgRNA
tataatgctcttgttcagga

SEQ ID NO: 104 - RNA, 20 nt, synthetic construct
  source 1..20: mol_type = other RNA
  ncRNA 1..20: ncRNA_class = sgRNA
attcattaagcagaaacatg

SEQ ID NO: 105 - RNA, 20 nt, synthetic construct
  source 1..20: mol_type = other RNA
  ncRNA 1..20: ncRNA_class = sgRNA
catggggctatccgctggtc

SEQ ID NO: 106 - RNA, 20 nt, synthetic construct
  source 1..20: mol_type = other RNA
  ncRNA 1..20: ncRNA_class = sgRNA
gaccacagtctgcaaagaca

SEQ ID NO: 107 - RNA, 20 nt, synthetic construct
  source 1..20: mol_type = other RNA
  ncRNA 1..20: ncRNA_class = sgRNA
caaggttctggaagaatgtc

SEQ ID NO: 108 - RNA, 20 nt, synthetic construct
  source 1..20: mol_type = other RNA
  ncRNA 1..20: ncRNA_class = sgRNA
ataagctgttcatttatgga

SEQ ID NO: 109 - RNA, 20 nt, synthetic construct
  source 1..20: mol_type = other RNA
  ncRNA 1..20: ncRNA_class = sgRNA
tcaagattgacattgtgctt

SEQ ID NO: 110 - RNA, 20 nt, synthetic construct
  source 1..20: mol_type = other RNA
  ncRNA 1..20: ncRNA_class = sgRNA
atactgtatccaaagactgt

SEQ ID NO: 111 - RNA, 20 nt, synthetic construct
  source 1..20: mol_type = other RNA
  ncRNA 1..20: ncRNA_class = sgRNA
ggatataagctgttcattta

SEQ ID NO: 112 - RNA, 20 nt, synthetic construct
  source 1..20: mol_type = other RNA
  ncRNA 1..20: ncRNA_class = sgRNA
agtctgcaaagacaaggttc

SEQ ID NO: 113 - RNA, 20 nt, synthetic construct
  source 1..20: mol_type = other RNA
  ncRNA 1..20: ncRNA_class = sgRNA
ttgacattgtgctttggtac

SEQ ID NO: 114 - RNA, 20 nt, synthetic construct
  source 1..20: mol_type = other RNA
  ncRNA 1..20: ncRNA_class = sgRNA
gacccttccccaacagtctt

SEQ ID NO: 115 - RNA, 20 nt, synthetic construct
  source 1..20: mol_type = other RNA
  ncRNA 1..20: ncRNA_class = sgRNA
tgtgtttaaagtcttgcctg

SEQ ID NO: 116 - RNA, 20 nt, synthetic construct
  source 1..20: mol_type = other RNA
  ncRNA 1..20: ncRNA_class = sgRNA
taagctgttcatttatggaa

SEQ ID NO: 117 - RNA, 20 nt, synthetic construct
  source 1..20: mol_type = other RNA
  ncRNA 1..20: ncRNA_class = sgRNA
gagaaacatcaggcttcagc

SEQ ID NO: 118 - RNA, 20 nt, synthetic construct
  source 1..20: mol_type = other RNA
  ncRNA 1..20: ncRNA_class = sgRNA
ttaatgaatttaatcgattc

SEQ ID NO: 119 - RNA, 20 nt, synthetic construct
  source 1..20: mol_type = other RNA
  ncRNA 1..20: ncRNA_class = sgRNA
aattcattaagcagaaacat

SEQ ID NO: 120 - RNA, 20 nt, synthetic construct
  source 1..20: mol_type = other RNA
  ncRNA 1..20: ncRNA_class = sgRNA
atccaaagactgttggggaa

SEQ ID NO: 121 - RNA, 20 nt, synthetic construct
  source 1..20: mol_type = other RNA
  ncRNA 1..20: ncRNA_class = sgRNA
attttagtcagagaaacatc

SEQ ID NO: 122 - RNA, 20 nt, synthetic construct
  source 1..20: mol_type = other RNA
  ncRNA 1..20: ncRNA_class = sgRNA
catgtataatgctcttgttc

SEQ ID NO: 123 - RNA, 20 nt, synthetic construct
  source 1..20: mol_type = other RNA
  ncRNA 1..20: ncRNA_class = sgRNA
cactgtttttccaagacctc

SEQ ID NO: 124 - RNA, 20 nt, synthetic construct
  source 1..20: mol_type = other RNA
  ncRNA 1..20: ncRNA_class = sgRNA
taaagtcttgcctgaggtct

SEQ ID NO: 125 - RNA, 20 nt, synthetic construct
  source 1..20: mol_type = other RNA
  ncRNA 1..20: ncRNA_class = sgRNA
ctggcattttctcatagtct

SEQ ID NO: 126 - RNA, 20 nt, synthetic construct
  source 1..20: mol_type = other RNA
  ncRNA 1..20: ncRNA_class = sgRNA
aaattcattaagcagaaaca

SEQ ID NO: 127 - RNA, 20 nt, synthetic construct
  source 1..20: mol_type = other RNA
  ncRNA 1..20: ncRNA_class = sgRNA
tatgattttctcccaataaa

SEQ ID NO: 128 - RNA, 20 nt, synthetic construct
  source 1..20: mol_type = other RNA
  ncRNA 1..20: ncRNA_class = sgRNA
ggattttctccagctcaagc

SEQ ID NO: 129 - RNA, 20 nt, synthetic construct
  source 1..20: mol_type = other RNA
  ncRNA 1..20: ncRNA_class = sgRNA
taaagttgtcctgcttgagc

SEQ ID NO: 130 - RNA, 20 nt, synthetic construct
  source 1..20: mol_type = other RNA
  ncRNA 1..20: ncRNA_class = sgRNA
tatatccagttaatatatcc

SEQ ID NO: 131 - RNA, 20 nt, synthetic construct
  source 1..20: mol_type = other RNA
  ncRNA 1..20: ncRNA_class = sgRNA
aatttccagaagcacatgat

SEQ ID NO: 132 - RNA, 20 nt, synthetic construct
  source 1..20: mol_type = other RNA
  ncRNA 1..20: ncRNA_class = sgRNA
atataccaatcatgtgcttc

SEQ ID NO: 133 - RNA, 20 nt, synthetic construct
  source 1..20: mol_type = other RNA
  ncRNA 1..20: ncRNA_class = sgRNA
acttctccatgctacccgag

SEQ ID NO: 134 - RNA, 20 nt, synthetic construct
  source 1..20: mol_type = other RNA
  ncRNA 1..20: ncRNA_class = sgRNA
accacatgccagtccagcga

SEQ ID NO: 135 - RNA, 20 nt, synthetic construct
  source 1..20: mol_type = other RNA
  ncRNA 1..20: ncRNA_class = sgRNA
gagaggctcacgtgcctctc

SEQ ID NO: 136 - RNA, 20 nt, synthetic construct
  source 1..20: mol_type = other RNA
  ncRNA 1..20: ncRNA_class = sgRNA
taaggagaaactgcaaagag

SEQ ID NO: 137 - RNA, 20 nt, synthetic construct
  source 1..20: mol_type = other RNA
  ncRNA 1..20: ncRNA_class = sgRNA
gaaggtgaccgtcgctggac

SEQ ID NO: 138 - RNA, 20 nt, synthetic construct
  source 1..20: mol_type = other RNA
  ncRNA 1..20: ncRNA_class = sgRNA
tagtggctggtgacagtaac

SEQ ID NO: 139 - RNA, 20 nt, synthetic construct
  source 1..20: mol_type = other RNA
  ncRNA 1..20: ncRNA_class = sgRNA
gttactgtcaccagccacta

SEQ ID NO: 140 - RNA, 20 nt, synthetic construct
  source 1..20: mol_type = other RNA
  ncRNA 1..20: ncRNA_class = sgRNA
accgtcgctggactggcatg

SEQ ID NO: 141 - RNA, 20 nt, synthetic construct
  source 1..20: mol_type = other RNA
  ncRNA 1..20: ncRNA_class = sgRNA
tagatgaaggtgaccgtcgc

SEQ ID NO: 142 - RNA, 20 nt, synthetic construct
  source 1..20: mol_type = other RNA
  ncRNA 1..20: ncRNA_class = sgRNA
tctttgcagtttctccttag

SEQ ID NO: 143 - RNA, 20 nt, synthetic construct
  source 1..20: mol_type = other RNA
  ncRNA 1..20: ncRNA_class = sgRNA
agagaggctcacgtgcctct

SEQ ID NO: 144 - RNA, 20 nt, synthetic construct
  source 1..20: mol_type = other RNA
  ncRNA 1..20: ncRNA_class = sgRNA
agtaactggtgtttagatga

SEQ ID NO: 145 - RNA, 20 nt, synthetic construct
  source 1..20: mol_type = other RNA
  ncRNA 1..20: ncRNA_class = sgRNA
tgcagtttctccttagtggc

SEQ ID NO: 146 - RNA, 20 nt, synthetic construct
  source 1..20: mol_type = other RNA
  ncRNA 1..20: ncRNA_class = sgRNA
cagtaagacacctatatcta

SEQ ID NO: 147 - RNA, 20 nt, synthetic construct
  source 1..20: mol_type = other RNA
  ncRNA 1..20: ncRNA_class = sgRNA
tatctatggaagtagactct

SEQ ID NO: 148 - RNA, 20 nt, synthetic construct
  source 1..20: mol_type = other RNA
  ncRNA 1..20: ncRNA_class = sgRNA
cccgaatcctccaccttagc

SEQ ID NO: 149 - RNA, 20 nt, synthetic construct
  source 1..20: mol_type = other RNA
  ncRNA 1..20: ncRNA_class = sgRNA
gtggtttgttcctgctaagg

SEQ ID NO: 150 - RNA, 20 nt, synthetic construct
  source 1..20: mol_type = other RNA
  ncRNA 1..20: ncRNA_class = sgRNA
gacattactattgtgtcgta

SEQ ID NO: 151 - RNA, 20 nt, synthetic construct
  source 1..20: mol_type = other RNA
  ncRNA 1..20: ncRNA_class = sgRNA
tctgtgttgtaacacaagtt

SEQ ID NO: 152 - RNA, 20 nt, synthetic construct
  source 1..20: mol_type = other RNA
  ncRNA 1..20: ncRNA_class = sgRNA
catcatagcgaatgtgacta

SEQ ID NO: 153 - RNA, 20 nt, synthetic construct
  source 1..20: mol_type = other RNA
  ncRNA 1..20: ncRNA_class = sgRNA
aatgtgactacggcgcataa

SEQ ID NO: 154 - RNA, 20 nt, synthetic construct
  source 1..20: mol_type = other RNA
  ncRNA 1..20: ncRNA_class = sgRNA
atgtgactacggcgcataat

SEQ ID NO: 155 - RNA, 20 nt, synthetic construct
  source 1..20: mol_type = other RNA
  ncRNA 1..20: ncRNA_class = sgRNA
ggtaatacgatattgctttc

SEQ ID NO: 156 - RNA, 20 nt, synthetic construct
  source 1..20: mol_type = other RNA
  ncRNA 1..20: ncRNA_class = sgRNA
gaaagcaatatcgtattacc

SEQ ID NO: 157 - RNA, 20 nt, synthetic construct
  source 1..20: mol_type = other RNA
  ncRNA 1..20: ncRNA_class = sgRNA
aaagcaatatcgtattaccc

SEQ ID NO: 158 - RNA, 20 nt, synthetic construct
  source 1..20: mol_type = other RNA
  ncRNA 1..20: ncRNA_class = sgRNA
atcagcacaaagataaactg

SEQ ID NO: 159 - RNA, 20 nt, synthetic construct
  source 1..20: mol_type = other RNA
  ncRNA 1..20: ncRNA_class = sgRNA
tccttttaaagatacatgtg

SEQ ID NO: 160 - RNA, 20 nt, synthetic construct
  source 1..20: mol_type = other RNA
  ncRNA 1..20: ncRNA_class = sgRNA
gagtctacttccatagatat

SEQ ID NO: 161 - RNA, 20 nt, synthetic construct
  source 1..20: mol_type = other RNA
  ncRNA 1..20: ncRNA_class = sgRNA
cctgctaaggtggaggattc

SEQ ID NO: 162 - RNA, 20 nt, synthetic construct
  source 1..20: mol_type = other RNA
  ncRNA 1..20: ncRNA_class = sgRNA
ttgggtttaaaaaacatgca

SEQ ID NO: 163 - RNA, 20 nt, synthetic construct
  source 1..20: mol_type = other RNA
  ncRNA 1..20: ncRNA_class = sgRNA
gtttgttcctgctaaggtgg

SEQ ID NO: 164 - RNA, 20 nt, synthetic construct
  source 1..20: mol_type = other RNA
  ncRNA 1..20: ncRNA_class = sgRNA
aaactacttgttgcggcaga

SEQ ID NO: 165 - RNA, 20 nt, synthetic construct
  source 1..20: mol_type = other RNA
  ncRNA 1..20: ncRNA_class = sgRNA
tcccaaaatacagtggcata

SEQ ID NO: 166 - RNA, 20 nt, synthetic construct
  source 1..20: mol_type = other RNA
  ncRNA 1..20: ncRNA_class = sgRNA
ggagcattttatacatactc

SEQ ID NO: 167 - RNA, 20 nt, synthetic construct
  source 1..20: mol_type = other RNA
  ncRNA 1..20: ncRNA_class = sgRNA
agaatatgaaagagttactc

SEQ ID NO: 168 - RNA, 20 nt, synthetic construct
  source 1..20: mol_type = other RNA
  ncRNA 1..20: ncRNA_class = sgRNA
actgtggtttgttcctgcta

SEQ ID NO: 169 - RNA, 20 nt, synthetic construct
  source 1..20: mol_type = other RNA
  ncRNA 1..20: ncRNA_class = sgRNA
atgagcttcccaaaatacag

SEQ ID NO: 170 - RNA, 20 nt, synthetic construct
  source 1..20: mol_type = other RNA
  ncRNA 1..20: ncRNA_class = sgRNA
acaacttgtgtgtccttata

SEQ ID NO: 171 - RNA, 20 nt, synthetic construct
  source 1..20: mol_type = other RNA
  ncRNA 1..20: ncRNA_class = sgRNA
cataatgggaaatatacttg

SEQ ID NO: 172 - RNA, 20 nt, synthetic construct
  source 1..20: mol_type = other RNA
  ncRNA 1..20: ncRNA_class = sgRNA
ttaaacccaaatgaagagaa

SEQ ID NO: 173 - RNA, 20 nt, synthetic construct
  source 1..20: mol_type = other RNA
  ncRNA 1..20: ncRNA_class = sgRNA
aagagaaaggcactataatt

SEQ ID NO: 174 - RNA, 20 nt, synthetic construct
  source 1..20: mol_type = other RNA
  ncRNA 1..20: ncRNA_class = sgRNA
tcctgctaaggtggaggatt

SEQ ID NO: 175 - RNA, 20 nt, synthetic construct
  source 1..20: mol_type = other RNA
  ncRNA 1..20: ncRNA_class = sgRNA
ctcatttcttctctggaagc

SEQ ID NO: 176 - RNA, 20 nt, synthetic construct
  source 1..20: mol_type = other RNA
  ncRNA 1..20: ncRNA_class = sgRNA
atagtgcctttctcttcatt

SEQ ID NO: 177 - RNA, 20 nt, synthetic construct
  source 1..20: mol_type = other RNA
  ncRNA 1..20: ncRNA_class = sgRNA
taaacagaaactacttgttg

SEQ ID NO: 178 - RNA, 20 nt, synthetic construct
  source 1..20: mol_type = other RNA
  ncRNA 1..20: ncRNA_class = sgRNA
tagtgcctttctcttcattt

SEQ ID NO: 179 - RNA, 20 nt, synthetic construct
  source 1..20: mol_type = other RNA
  ncRNA 1..20: ncRNA_class = sgRNA
tttatattgtcaagaagcag

SEQ ID NO: 180 - RNA, 20 nt, synthetic construct
  source 1..20: mol_type = other RNA
  ncRNA 1..20: ncRNA_class = sgRNA
gcagatgaaactaaaattac

SEQ ID NO: 181 - RNA, 20 nt, synthetic construct
  source 1..20: mol_type = other RNA
  ncRNA 1..20: ncRNA_class = sgRNA
agctatactcatttcttctc

SEQ ID NO: 182 - RNA, 20 nt, synthetic construct
  source 1..20: mol_type = other RNA
  ncRNA 1..20: ncRNA_class = sgRNA
accttatgccactgtatttt

SEQ ID NO: 183 - RNA, 20 nt, synthetic construct
  source 1..20: mol_type = other RNA
  ncRNA 1..20: ncRNA_class = sgRNA
cttgacaatataaactttat

SEQ ID NO: 184 - RNA, 20 nt, synthetic construct
  source 1..20: mol_type = other RNA
  ncRNA 1..20: ncRNA_class = sgRNA
tagcagttattttaattttg

SEQ ID NO: 185 - RNA, 20 nt, synthetic construct
  source 1..20: mol_type = other RNA
  ncRNA 1..20: ncRNA_class = sgRNA
taccttatgccactgtattt

SEQ ID NO: 186 - RNA, 20 nt, synthetic construct
  source 1..20: mol_type = other RNA
  ncRNA 1..20: ncRNA_class = sgRNA
agtagtaagttctataaccc

SEQ ID NO: 187 - RNA, 20 nt, synthetic construct
  source 1..20: mol_type = other RNA
  ncRNA 1..20: ncRNA_class = sgRNA
tagtagtaagttctataacc

SEQ ID NO: 188 - RNA, 20 nt, synthetic construct
  source 1..20: mol_type = other RNA
  ncRNA 1..20: ncRNA_class = sgRNA
gagtccagctaatgagacag

SEQ ID NO: 189 - RNA, 20 nt, synthetic construct
  source 1..20: mol_type = other RNA
  ncRNA 1..20: ncRNA_class = sgRNA
gttgcacagcaattgtagct

SEQ ID NO: 190 - RNA, 20 nt, synthetic construct
  source 1..20: mol_type = other RNA
  ncRNA 1..20: ncRNA_class = sgRNA
caattgctgtgcaacgtcag

SEQ ID NO: 191 - RNA, 20 nt, synthetic construct
  source 1..20: mol_type = other RNA
  ncRNA 1..20: ncRNA_class = sgRNA
atctgtattcttcgctacac

SEQ ID NO: 192 - RNA, 20 nt, synthetic construct
  source 1..20: mol_type = other RNA
  ncRNA 1..20: ncRNA_class = sgRNA
cagaagaacacaaacctgtg

SEQ ID NO: 193 - RNA, 20 nt, synthetic construct
  source 1..20: mol_type = other RNA
  ncRNA 1..20: ncRNA_class = sgRNA
ctcacaattataggcctcac

SEQ ID NO: 194 - RNA, 20 nt, synthetic construct
  source 1..20: mol_type = other RNA
  ncRNA 1..20: ncRNA_class = sgRNA
ttgtctactggacgtggaat

SEQ ID NO: 195 - RNA, 20 nt, synthetic construct
  source 1..20: mol_type = other RNA
  ncRNA 1..20: ncRNA_class = sgRNA
ttcttcgctacacaggtaaa

SEQ ID NO: 196 - RNA, 20 nt, synthetic construct
  source 1..20: mol_type = other RNA
  ncRNA 1..20: ncRNA_class = sgRNA
tgtgtagcgaagaatacaga

SEQ ID NO: 197 - RNA, 20 nt, synthetic construct
  source 1..20: mol_type = other RNA
  ncRNA 1..20: ncRNA_class = sgRNA
tgggtcatcaattgatatag

SEQ ID NO: 198 - RNA, 20 nt, synthetic construct
  source 1..20: mol_type = other RNA
  ncRNA 1..20: ncRNA_class = sgRNA
gagacagtggaagcaagttt

SEQ ID NO: 199 - RNA, 20 nt, synthetic construct
  source 1..20: mol_type = other RNA
  ncRNA 1..20: ncRNA_class = sgRNA
gtgactttgtctactggacg

SEQ ID NO: 200 - RNA, 20 nt, synthetic construct
  source 1..20: mol_type = other RNA
  ncRNA 1..20: ncRNA_class = sgRNA
tttgtctactggacgtggaa

SEQ ID NO: 201 - RNA, 20 nt, synthetic construct
  source 1..20: mol_type = other RNA
  ncRNA 1..20: ncRNA_class = sgRNA
tgatatagaggactcagtgc

SEQ ID NO: 202 - RNA, 20 nt, synthetic construct
  source 1..20: mol_type = other RNA
  ncRNA 1..20: ncRNA_class = sgRNA
gcttccactgtctcattagc

SEQ ID NO: 203 - RNA, 20 nt, synthetic construct
  source 1..20: mol_type = other RNA
  ncRNA 1..20: ncRNA_class = sgRNA
agtagacaaagtcactaaag

SEQ ID NO: 204 - RNA, 20 nt, synthetic construct
  source 1..20: mol_type = other RNA
  ncRNA 1..20: ncRNA_class = sgRNA
attcttcgctacacaggtaa

SEQ ID NO: 205 - RNA, 20 nt, synthetic construct
  source 1..20: mol_type = other RNA
  ncRNA 1..20: ncRNA_class = sgRNA
tgagacagtggaagcaagtt

SEQ ID NO: 206 - RNA, 20 nt, synthetic construct
  source 1..20: mol_type = other RNA
  ncRNA 1..20: ncRNA_class = sgRNA
tatagaggactcagtgctgg

SEQ ID NO: 207 - RNA, 20 nt, synthetic construct
  source 1..20: mol_type = other RNA
  ncRNA 1..20: ncRNA_class = sgRNA
gttatagaacttactactat

SEQ ID NO: 208 - RNA, 20 nt, synthetic construct
  source 1..20: mol_type = other RNA
  ncRNA 1..20: ncRNA_class = sgRNA
ttagctggactcacaattat

SEQ ID NO: 209 - RNA, 20 nt, synthetic construct
  source 1..20: mol_type = other RNA
  ncRNA 1..20: ncRNA_class = sgRNA
actttagtgactttgtctac

SEQ ID NO: 210 - RNA, 20 nt, synthetic construct
  source 1..20: mol_type = other RNA
  ncRNA 1..20: ncRNA_class = sgRNA
cacttctaaaatattaagca

SEQ ID NO: 211 - RNA, 20 nt, synthetic construct
  source 1..20: mol_type = other RNA
  ncRNA 1..20: ncRNA_class = sgRNA
agaggactcagtgctggagg

SEQ ID NO: 212 - RNA, 20 nt, synthetic construct
  source 1..20: mol_type = other RNA
  ncRNA 1..20: ncRNA_class = sgRNA
catgcttaatattttagaag

SEQ ID NO: 213 - RNA, 20 nt, synthetic construct
  source 1..20: mol_type = other RNA
  ncRNA 1..20: ncRNA_class = sgRNA
gtactctttcttttttttga

SEQ ID NO: 214 - RNA, 20 nt, synthetic construct
  source 1..20: mol_type = other RNA
  ncRNA 1..20: ncRNA_class = sgRNA
tgacattgtgctttggtaca

SEQ ID NO: 215 - RNA, 20 nt, synthetic construct
  source 1..20: mol_type = other RNA
  ncRNA 1..20: ncRNA_class = sgRNA
actatacccaaagacccttg

SEQ ID NO: 216 - RNA, 20 nt, synthetic construct
  source 1..20: mol_type = other RNA
  ncRNA 1..20: ncRNA_class = sgRNA
agaggtggacccttccccaa

SEQ ID NO: 217 - RNA, 20 nt, synthetic construct
  source 1..20: mol_type = other RNA
  ncRNA 1..20: ncRNA_class = sgRNA
tagaggtggacccttcccca

SEQ ID NO: 218 - RNA, 20 nt, synthetic construct
  source 1..20: mol_type = other RNA
  ncRNA 1..20: ncRNA_class = sgRNA
atggaagggatgcctatgtt

SEQ ID NO: 219 - RNA, 20 nt, synthetic construct
  source 1..20: mol_type = other RNA
  ncRNA 1..20: ncRNA_class = sgRNA
tggaagggatgcctatgttg

SEQ ID NO: 220 - RNA, 20 nt, synthetic construct
  source 1..20: mol_type = other RNA
  ncRNA 1..20: ncRNA_class = sgRNA
acacataccttccccaacat

SEQ ID NO: 221 - RNA, 20 nt, synthetic construct
  source 1..20: mol_type = other RNA
  ncRNA 1..20: ncRNA_class = sgRNA
agggatgcctatgttgggga

SEQ ID NO: 222 - RNA, 20 nt, synthetic construct
  source 1..20: mol_type = other RNA
  ncRNA 1..20: ncRNA_class = sgRNA
gctcttcagaagaattcccc

SEQ ID NO: 223 - RNA, 20 nt, synthetic construct
  source 1..20: mol_type = other RNA
  ncRNA 1..20: ncRNA_class = sgRNA
agaaacatggggccatccgc

SEQ ID NO: 224 - RNA, 20 nt, synthetic construct
  source 1..20: mol_type = other RNA
  ncRNA 1..20: ncRNA_class = sgRNA
aaagtcccctgaccagcgga

SEQ ID NO: 225 - RNA, 20 nt, synthetic construct
  source 1..20: mol_type = other RNA
  ncRNA 1..20: ncRNA_class = sgRNA
tgctaaagtcccctgaccag

SEQ ID NO: 226 - RNA, 20 nt, synthetic construct
  source 1..20: mol_type = other RNA
  ncRNA 1..20: ncRNA_class = sgRNA
atggggccatccgctggtca

SEQ ID NO: 227 - RNA, 20 nt, synthetic construct
  source 1..20: mol_type = other RNA
  ncRNA 1..20: ncRNA_class = sgRNA
tggggccatccgctggtcag

SEQ ID NO: 228 - RNA, 20 nt, synthetic construct
  source 1..20: mol_type = other RNA
  ncRNA 1..20: ncRNA_class = sgRNA
gaggtcttggaagaacagtg

SEQ ID NO: 229 - RNA, 20 nt, synthetic construct
  source 1..20: mol_type = other RNA
  ncRNA 1..20: ncRNA_class = sgRNA
catcaggattgggctgcctg

SEQ ID NO: 230 - RNA, 20 nt, synthetic construct
  source 1..20: mol_type = other RNA
  ncRNA 1..20: ncRNA_class = sgRNA
tacccaaagacccttgggga

SEQ ID NO: 231 - RNA, 20 nt, synthetic construct
  source 1..20: mol_type = other RNA
  ncRNA 1..20: ncRNA_class = sgRNA
aggtagctaatgaaaacata

SEQ ID NO: 232 - RNA, 20 nt, synthetic construct
  source 1..20: mol_type = other RNA
  ncRNA 1..20: ncRNA_class = sgRNA
tactatacccaaagaccctt

SEQ ID NO: 233 - RNA, 20 nt, synthetic construct
  source 1..20: mol_type = other RNA
  ncRNA 1..20: ncRNA_class = sgRNA
atactatacccaaagaccct

SEQ ID NO: 234 - RNA, 20 nt, synthetic construct
  source 1..20: mol_type = other RNA
  ncRNA 1..20: ncRNA_class = sgRNA
catggggccatccgctggtc

SEQ ID NO: 235 - RNA, 20 nt, synthetic construct
  source 1..20: mol_type = other RNA
  ncRNA 1..20: ncRNA_class = sgRNA
ataagctgttcatttatgga

SEQ ID NO: 236 - RNA, 20 nt, synthetic construct
  source 1..20: mol_type = other RNA
  ncRNA 1..20: ncRNA_class = sgRNA
tcaaggttgacattgtgctt

SEQ ID NO: 237 - RNA, 20 nt, synthetic construct
  source 1..20: mol_type = other RNA
  ncRNA 1..20: ncRNA_class = sgRNA
tatggaagggatgcctatgt

SEQ ID NO: 238 - RNA, 20 nt, synthetic construct
  source 1..20: mol_type = other RNA
  ncRNA 1..20: ncRNA_class = sgRNA
gtatagtatgtatgcatcat

SEQ ID NO: 239 - RNA, 20 nt, synthetic construct
  source 1..20: mol_type = other RNA
  ncRNA 1..20: ncRNA_class = sgRNA
ttgacattgtgctttggtac

SEQ ID NO: 240 - RNA, 20 nt, synthetic construct
  source 1..20: mol_type = other RNA
  ncRNA 1..20: ncRNA_class = sgRNA
attcattaagcagaaacatg

SEQ ID NO: 241 - RNA, 20 nt, synthetic construct
  source 1..20: mol_type = other RNA
  ncRNA 1..20: ncRNA_class = sgRNA
ggattttctccagttcaagc

SEQ ID NO: 242 - RNA, 20 nt, synthetic construct
  source 1..20: mol_type = other RNA
  ncRNA 1..20: ncRNA_class = sgRNA
acccttccccaagggtcttt

SEQ ID NO: 243 - RNA, 20 nt, synthetic construct
  source 1..20: mol_type = other RNA
  ncRNA 1..20: ncRNA_class = sgRNA
tatgagtttctccccaaaaa

SEQ ID NO: 244 - RNA, 20 nt, synthetic construct
  source 1..20: mol_type = other RNA
  ncRNA 1..20: ncRNA_class = sgRNA
ggtcccagaaacatcaggat

SEQ ID NO: 245 - RNA, 20 nt, synthetic construct
  source 1..20: mol_type = other RNA
  ncRNA 1..20: ncRNA_class = sgRNA
ggatataagctgttcattta

SEQ ID NO: 246 - RNA, 20 nt, synthetic construct
  source 1..20: mol_type = other RNA
  ncRNA 1..20: ncRNA_class = sgRNA
tgtgtttaaagtcttgcctg

SEQ ID NO: 247 - RNA, 20 nt, synthetic construct
  source 1..20: mol_type = other RNA
  ncRNA 1..20: ncRNA_class = sgRNA
taaagtcttgcctgaggtct

SEQ ID NO: 248 - RNA, 20 nt, synthetic construct
  source 1..20: mol_type = other RNA
  ncRNA 1..20: ncRNA_class = sgRNA
taagctgttcatttatggaa

SEQ ID NO: 249 - RNA, 20 nt, synthetic construct
  source 1..20: mol_type = other RNA
  ncRNA 1..20: ncRNA_class = sgRNA
gtcccagaaacatcaggatt

SEQ ID NO: 250 - RNA, 20 nt, synthetic construct
  source 1..20: mol_type = other RNA
  ncRNA 1..20: ncRNA_class = sgRNA
acccaaagacccttggggaa

SEQ ID NO: 251 - RNA, 20 nt, synthetic construct
  source 1..20: mol_type = other RNA
  ncRNA 1..20: ncRNA_class = sgRNA
aatgtacaatgcttttgttc

SEQ ID NO: 252 - RNA, 20 nt, synthetic construct
  source 1..20: mol_type = other RNA
  ncRNA 1..20: ncRNA_class = sgRNA
gacccttccccaagggtctt

SEQ ID NO: 253 - RNA, 20 nt, synthetic construct
  source 1..20: mol_type = other RNA
  ncRNA 1..20: ncRNA_class = sgRNA
tacaatgcttttgttcagga

SEQ ID NO: 254 - RNA, 20 nt, synthetic construct
  source 1..20: mol_type = other RNA
  ncRNA 1..20: ncRNA_class = sgRNA
agcccaatcctgatgtttct

SEQ ID NO: 255 - RNA, 20 nt, synthetic construct
  source 1..20: mol_type = other RNA
  ncRNA 1..20: ncRNA_class = sgRNA
aattcattaagcagaaacat

SEQ ID NO: 256 - RNA, 20 nt, synthetic construct
  source 1..20: mol_type = other RNA
  ncRNA 1..20: ncRNA_class = sgRNA
cagcccaatcctgatgtttc

SEQ ID NO: 257 - RNA, 20 nt, synthetic construct
  source 1..20: mol_type = other RNA
  ncRNA 1..20: ncRNA_class = sgRNA
cactgttcttccaagacctc

SEQ ID NO: 258 - RNA, 20 nt, synthetic construct
  source 1..20: mol_type = other RNA
  ncRNA 1..20: ncRNA_class = sgRNA
aaaaatatctgagttagagg

SEQ ID NO: 259 - RNA, 20 nt, synthetic construct
  source 1..20: mol_type = other RNA
  ncRNA 1..20: ncRNA_class = sgRNA
acaacattgtaccttttttg

SEQ ID NO: 260 - RNA, 20 nt, synthetic construct
  source 1..20: mol_type = other RNA
  ncRNA 1..20: ncRNA_class = sgRNA
ctggcattttctcatagtct

SEQ ID NO: 261 - RNA, 20 nt, synthetic construct
  source 1..20: mol_type = other RNA
  ncRNA 1..20: ncRNA_class = sgRNA
taaagttgtcctgcttgaac

SEQ ID NO: 262 - RNA, 20 nt, synthetic construct
  source 1..20: mol_type = other RNA
  ncRNA 1..20: ncRNA_class = sgRNA
acatcaggattgggctgcct

SEQ ID NO: 263 - RNA, 20 nt, synthetic construct
  source 1..20: mol_type = other RNA
  ncRNA 1..20: ncRNA_class = sgRNA
aaattcattaagcagaaaca

SEQ ID NO: 264 - RNA, 20 nt, synthetic construct
  source 1..20: mol_type = other RNA
  ncRNA 1..20: ncRNA_class = sgRNA
cacaaaaatatctgagttag

SEQ ID NO: 265 - RNA, 20 nt, synthetic construct
  source 1..20: mol_type = other RNA
  ncRNA 1..20: ncRNA_class = sgRNA
cagaagactgatcatcattt

SEQ ID NO: 266 - RNA, 20 nt, synthetic construct
  source 1..20: mol_type = other RNA
  ncRNA 1..20: ncRNA_class = sgRNA
attttggtcccagaaacatc

SEQ ID NO: 267 - RNA, 20 nt, synthetic construct
  source 1..20: mol_type = other RNA
  ncRNA 1..20: ncRNA_class = sgRNA
ttttcacctctagcttcaga

SEQ ID NO: 268 - RNA, 20 nt, synthetic construct
  source 1..20: mol_type = other RNA
  ncRNA 1..20: ncRNA_class = sgRNA
atacaacattgtaccttttt

SEQ ID NO: 269 - RNA, 20 nt, synthetic construct
  source 1..20: mol_type = other RNA
  ncRNA 1..20: ncRNA_class = sgRNA
gtctttttcagacattgttg

SEQ ID NO: 270 - RNA, 20 nt, synthetic construct
  source 1..20: mol_type = other RNA
  ncRNA 1..20: ncRNA_class = sgRNA
tacaacattgtacctttttt

SEQ ID NO: 271 - RNA, 20 nt, synthetic construct
  source 1..20: mol_type = other RNA
  ncRNA 1..20: ncRNA_class = sgRNA
aacatcaggattgggctgcc

SEQ ID NO: 272 - RNA, 20 nt, synthetic construct
  source 1..20: mol_type = other RNA
  ncRNA 1..20: ncRNA_class = sgRNA
tttctgcttaatgaatttaa

SEQ ID NO: 273 - RNA, 20 nt, synthetic construct
  source 1..20: mol_type = other RNA
  ncRNA 1..20: ncRNA_class = sgRNA
tttcatctacaaaatcttca

SEQ ID NO: 274 - RNA, 20 nt, synthetic construct
  source 1..20: mol_type = other RNA
  ncRNA 1..20: ncRNA_class = sgRNA
ttaatgaatttaatggtttc

SEQ ID NO: 275 - RNA, 20 nt, synthetic construct
  source 1..20: mol_type = other RNA
  ncRNA 1..20: ncRNA_class = sgRNA
tggtcaggggactttagcaa

SEQ ID NO: 276 - RNA, 20 nt, synthetic construct
  source 1..20: mol_type = other RNA
  ncRNA 1..20: ncRNA_class = sgRNA
ctggtcaggggactttagca

SEQ ID NO: 277 - RNA, 20 nt, synthetic construct
  source 1..20: mol_type = other RNA
  ncRNA 1..20: ncRNA_class = sgRNA
caaggttctggaagaacgtc

SEQ ID NO: 278 - RNA, 20 nt, synthetic construct
  source 1..20: mol_type = other RNA
  ncRNA 1..20: ncRNA_class = sgRNA
aatctgcaaagacaaggttc

SEQ ID NO: 279 - RNA, 20 nt, synthetic construct
  source 1..20: mol_type = other RNA
  ncRNA 1..20: ncRNA_class = sgRNA
gattgcaatctgcaaagaca

SEQ ID NO: 280 - RNA, 20 nt, synthetic construct
  source 1..20: mol_type = other RNA
  ncRNA 1..20: ncRNA_class = sgRNA
tatatccaattaatacatcc

SEQ ID NO: 281 - RNA, 20 nt, synthetic construct
  source 1..20: mol_type = other RNA
  ncRNA 1..20: ncRNA_class = sgRNA
gatttcaagaagcacatgat

SEQ ID NO: 282 - RNA, 20 nt, synthetic construct
  source 1..20: mol_type = other RNA
  ncRNA 1..20: ncRNA_class = sgRNA
atcatgtgcttcttgaaatc

SEQ ID NO: 283 - RNA, 20 nt, synthetic construct
  source 1..20: mol_type = other RNA
  ncRNA 1..20: ncRNA_class = sgRNA
ttttacctggatgtattaat

SEQ ID NO: 284 - RNA, 20 nt, synthetic construct
  source 1..20: mol_type = other RNA
  ncRNA 1..20: ncRNA_class = sgRNA
gaacgtcaggtaccacatgc

SEQ ID NO: 285 - RNA, 20 nt, synthetic construct
  source 1..20: mol_type = other RNA
  ncRNA 1..20: ncRNA_class = sgRNA
ggtaccacatgccggtccag

SEQ ID NO: 286 - RNA, 20 nt, synthetic construct
  source 1..20: mol_type = other RNA
  ncRNA 1..20: ncRNA_class = sgRNA
cgtcttcgagtctggcctgg

SEQ ID NO: 287 - RNA, 20 nt, synthetic construct
  source 1..20: mol_type = other RNA
  ncRNA 1..20: ncRNA_class = sgRNA
gctgccgctggaccggcatg

SEQ ID NO: 288 - RNA, 20 nt, synthetic construct
  source 1..20: mol_type = other RNA
  ncRNA 1..20: ncRNA_class = sgRNA
cagcgtcttcgagtctggcc

SEQ ID NO: 289 - RNA, 20 nt, synthetic construct
  source 1..20: mol_type = other RNA
  ncRNA 1..20: ncRNA_class = sgRNA
gaaggtggctgccgctggac

SEQ ID NO: 290 - RNA, 20 nt, synthetic construct
  source 1..20: mol_type = other RNA
  ncRNA 1..20: ncRNA_class = sgRNA
caaggacagagactggtgtt

SEQ ID NO: 291 - RNA, 20 nt, synthetic construct
  source 1..20: mol_type = other RNA
  ncRNA 1..20: ncRNA_class = sgRNA
ctctgcagcgtcttcgagtc

SEQ ID NO: 292 - RNA, 20 nt, synthetic construct
  source 1..20: mol_type = other RNA
  ncRNA 1..20: ncRNA_class = sgRNA
gactggtgtttggatgaagg

SEQ ID NO: 293 - RNA, 20 nt, synthetic construct
  source 1..20: mol_type = other RNA
  ncRNA 1..20: ncRNA_class = sgRNA
agagactggtgtttggatga

SEQ ID NO: 294 - RNA, 20 nt, synthetic construct
  source 1..20: mol_type = other RNA
  ncRNA 1..20: ncRNA_class = sgRNA
caaacaccagtctctgtcct

SEQ ID NO: 295 - RNA, 20 nt, synthetic construct
  source 1..20: mol_type = other RNA
  ncRNA 1..20: ncRNA_class = sgRNA
tggtggccaaggacagagac

SEQ ID NO: 296 - RNA, 20 nt, synthetic construct
  source 1..20: mol_type = other RNA
  ncRNA 1..20: ncRNA_class = sgRNA
cgagtctggcctggtggcca

SEQ ID NO: 297 - RNA, 20 nt, synthetic construct
  source 1..20: mol_type = other RNA
  ncRNA 1..20: ncRNA_class = sgRNA
agtctctgtccttggccacc

SEQ ID NO: 298 - RNA, 20 nt, synthetic construct
  source 1..20: mol_type = other RNA
  ncRNA 1..20: ncRNA_class = sgRNA
tggatgaaggtggctgccgc

SEQ ID NO: 299 - RNA, 20 nt, synthetic construct
  source 1..20: mol_type = other RNA
  ncRNA 1..20: ncRNA_class = sgRNA
atgagttacccgaaatacag

SEQ ID NO: 300 - RNA, 20 nt, synthetic construct
  source 1..20: mol_type = other RNA
  ncRNA 1..20: ncRNA_class = sgRNA
ttaactggactcacgatcag

SEQ ID NO: 301 - RNA, 20 nt, synthetic construct
  source 1..20: mol_type = other RNA
  ncRNA 1..20: ncRNA_class = sgRNA
aaacctggtgtgctcttgca

SEQ ID NO: 302 - RNA, 20 nt, synthetic construct
  source 1..20: mol_type = other RNA
  ncRNA 1..20: ncRNA_class = sgRNA
gagtctcgttccatagacac

SEQ ID NO: 303 - RNA, 20 nt, synthetic construct
  source 1..20: mol_type = other RNA
  ncRNA 1..20: ncRNA_class = sgRNA
gacattactattgtgcagta

SEQ ID NO: 304 - RNA, 20 nt, synthetic construct
  source 1..20: mol_type = other RNA
  ncRNA 1..20: ncRNA_class = sgRNA
gagtccagttaatgagacga

SEQ ID NO: 305 - RNA, 20 nt, synthetic construct
  source 1..20: mol_type = other RNA
  ncRNA 1..20: ncRNA_class = sgRNA
acattgctttgcaggatcgc

SEQ ID NO: 306 - RNA, 20 nt, synthetic construct
  source 1..20: mol_type = other RNA
  ncRNA 1..20: ncRNA_class = sgRNA
tattgtcgagaagtagaggt

SEQ ID NO: 307 - RNA, 20 nt, synthetic construct
  source 1..20: mol_type = other RNA
  ncRNA 1..20: ncRNA_class = sgRNA
gagtaataagtcctataacc

SEQ ID NO: 308 - RNA, 20 nt, synthetic construct
  source 1..20: mol_type = other RNA
  ncRNA 1..20: ncRNA_class = sgRNA
ctgcatatgaaattgacgtt

SEQ ID NO: 309 - RNA, 20 nt, synthetic construct
  source 1..20: mol_type = other RNA
  ncRNA 1..20: ncRNA_class = sgRNA
tttacacagaaactacccct

SEQ ID NO: 310 - RNA, 20 nt, synthetic construct
  source 1..20: mol_type = other RNA
  ncRNA 1..20: ncRNA_class = sgRNA
catatatcctacacacactt

SEQ ID NO: 311 - RNA, 20 nt, synthetic construct
  source 1..20: mol_type = other RNA
  ncRNA 1..20: ncRNA_class = sgRNA
agtaataagtcctataaccc

SEQ ID NO: 312 - RNA, 20 nt, synthetic construct
  source 1..20: mol_type = other RNA
  ncRNA 1..20: ncRNA_class = sgRNA
gagacgatggaagtggactt

SEQ ID NO: 313 - RNA, 20 nt, synthetic construct
  source 1..20: mol_type = other RNA
  ncRNA 1..20: ncRNA_class = sgRNA
ttactgactttgtgtactgg

SEQ ID NO: 314 - RNA, 20 nt, synthetic construct
  source 1..20: mol_type = other RNA
  ncRNA 1..20: ncRNA_class = sgRNA
ttgcaagagcacaccaggtt

SEQ ID NO: 315 - RNA, 20 nt, synthetic construct
  source 1..20: mol_type = other RNA
  ncRNA 1..20: ncRNA_class = sgRNA
cagccttgcaagagcacacc

SEQ ID NO: 316 - RNA, 20 nt, synthetic construct
  source 1..20: mol_type = other RNA
  ncRNA 1..20: ncRNA_class = sgRNA
tgtctatggaacgagactct

SEQ ID NO: 317 - RNA, 20 nt, synthetic construct
  source 1..20: mol_type = other RNA
  ncRNA 1..20: ncRNA_class = sgRNA
tgtgcattgtaacacaagtc

SEQ ID NO: 318 - RNA, 20 nt, synthetic construct
  source 1..20: mol_type = other RNA
  ncRNA 1..20: ncRNA_class = sgRNA
acccgaaatacagtggtata

SEQ ID NO: 319 - RNA, 20 nt, synthetic construct
  source 1..20: mol_type = other RNA
  ncRNA 1..20: ncRNA_class = sgRNA
gaaaacaatatcctattacc

SEQ ID NO: 320 - RNA, 20 nt, synthetic construct
  source 1..20: mol_type = other RNA
  ncRNA 1..20: ncRNA_class = sgRNA
ctcacgatcagaggcttcgt

SEQ ID NO: 321 - RNA, 20 nt, synthetic construct
  source 1..20: mol_type = other RNA
  ncRNA 1..20: ncRNA_class = sgRNA
aatgtgacagaagcgcataa

SEQ ID NO: 322 - RNA, 20 nt, synthetic construct
  source 1..20: mol_type = other RNA
  ncRNA 1..20: ncRNA_class = sgRNA
aaaacaatatcctattaccc

SEQ ID NO: 323 - RNA, 20 nt, synthetic construct
  source 1..20: mol_type = other RNA
  ncRNA 1..20: ncRNA_class = sgRNA
agtcctataacccgggtaat

SEQ ID NO: 324 - RNA, 20 nt, synthetic construct
  source 1..20: mol_type = other RNA
  ncRNA 1..20: ncRNA_class = sgRNA
atgtgacagaagcgcataaa

SEQ ID NO: 325 - RNA, 20 nt, synthetic construct
  source 1..20: mol_type = other RNA
  ncRNA 1..20: ncRNA_class = sgRNA
actcacgatcagaggcttcg

SEQ ID NO: 326 - RNA, 20 nt, synthetic construct
  source 1..20: mol_type = other RNA
  ncRNA 1..20: ncRNA_class = sgRNA
tatactcttccaccagcact

SEQ ID NO: 327 - RNA, 20 nt, synthetic construct
  source 1..20: mol_type = other RNA
  ncRNA 1..20: ncRNA_class = sgRNA
cagcgagacacctgtgtcta

SEQ ID NO: 328 - RNA, 20 nt, synthetic construct
  source 1..20: mol_type = other RNA
  ncRNA 1..20: ncRNA_class = sgRNA
gtttgttcctgctaaaatag

SEQ ID NO: 329 - RNA, 20 nt, synthetic construct
  source 1..20: mol_type = other RNA
  ncRNA 1..20: ncRNA_class = sgRNA
gatttccagaagcacgtgat

SEQ ID NO: 330 - RNA, 20 nt, synthetic construct
  source 1..20: mol_type = other RNA
  ncRNA 1..20: ncRNA_class = sgRNA
tatgtccaattaagacaacc

SEQ ID NO: 331 - RNA, 20 nt, synthetic construct
  source 1..20: mol_type = other RNA
  ncRNA 1..20: ncRNA_class = sgRNA
tcacgtgcttctggaaatca

SEQ ID NO: 332 - RNA, 20 nt, synthetic construct
  source 1..20: mol_type = other RNA
  ncRNA 1..20: ncRNA_class = sgRNA
aaaacccttccctcaaaaga

SEQ ID NO: 333 - RNA, 20 nt, synthetic construct
  source 1..20: mol_type = other RNA
  ncRNA 1..20: ncRNA_class = sgRNA
agtgcttaatatttcggcag

SEQ ID NO: 334 - RNA, 20 nt, synthetic construct
  source 1..20: mol_type = other RNA
  ncRNA 1..20: ncRNA_class = sgRNA
ttcttggctaaacaggtaaa

SEQ ID NO: 335 - RNA, 20 nt, synthetic construct
  source 1..20: mol_type = other RNA
  ncRNA 1..20: ncRNA_class = sgRNA
atatgaattcttggctaaac

SEQ ID NO: 336 - RNA, 20 nt, synthetic construct
  source 1..20: mol_type = other RNA
  ncRNA 1..20: ncRNA_class = sgRNA
tgtttagccaagaattcata

SEQ ID NO: 337 - RNA, 20 nt, synthetic construct
  source 1..20: mol_type = other RNA
  ncRNA 1..20: ncRNA_class = sgRNA
atcacgtgcttctggaaatc

SEQ ID NO: 338 - RNA, 20 nt, synthetic construct
  source 1..20: mol_type = other RNA
  ncRNA 1..20: ncRNA_class = sgRNA
atgtaattgctactgttaac

SEQ ID NO: 339 - RNA, 20 nt, synthetic construct
  source 1..20: mol_type = other RNA
  ncRNA 1..20: ncRNA_class = sgRNA
tatgccttcttttgagggaa

SEQ ID NO: 340 - RNA, 20 nt, synthetic construct
  source 1..20: mol_type = other RNA
  ncRNA 1..20: ncRNA_class = sgRNA
gtatgccttcttttgaggga

SEQ ID NO: 341 - RNA, 20 nt, synthetic construct
  source 1..20: mol_type = other RNA
  ncRNA 1..20: ncRNA_class = sgRNA
aagtgtatgccttcttttga

SEQ ID NO: 342 - RNA, 20 nt, synthetic construct
  source 1..20: mol_type = other RNA
  ncRNA 1..20: ncRNA_class = sgRNA
taagtgtatgccttcttttg

SEQ ID NO: 343 - RNA, 20 nt, synthetic construct
  source 1..20: mol_type = other RNA
  ncRNA 1..20: ncRNA_class = sgRNA
ctaaacaggtaaatggatat

SEQ ID NO: 344 - RNA, 20 nt, synthetic construct
  source 1..20: mol_type = other RNA
  ncRNA 1..20: ncRNA_class = sgRNA
gtttacctggttgtcttaat

SEQ ID NO: 345 - RNA, 20 nt, synthetic construct
  source 1..20: mol_type = other RNA
  ncRNA 1..20: ncRNA_class = sgRNA
acttctaccatatgaattct

SEQ ID NO: 346 - RNA, 20 nt, synthetic construct
  source 1..20: mol_type = other RNA
  ncRNA 1..20: ncRNA_class = sgRNA
atatgccaatcacgtgcttc

SEQ ID NO: 347 - RNA, 20 nt, synthetic construct
  source 1..20: mol_type = other RNA
  ncRNA 1..20: ncRNA_class = sgRNA
tatcacagtgcttaatattt

SEQ ID NO: 348 - RNA, 20 nt, synthetic construct
  source 1..20: mol_type = other RNA
  ncRNA 1..20: ncRNA_class = sgRNA
tgacctggtgctttggtaca

SEQ ID NO: 349 - RNA, 20 nt, synthetic construct
  source 1..20: mol_type = other RNA
  ncRNA 1..20: ncRNA_class = sgRNA
gaggtcttggaaaaacagtg

SEQ ID NO: 350 - RNA, 20 nt, synthetic construct
  source 1..20: mol_type = other RNA
  ncRNA 1..20: ncRNA_class = sgRNA
aatccctgtaccaaagcacc

SEQ ID NO: 351 - RNA, 20 nt, synthetic construct
  source 1..20: mol_type = other RNA
  ncRNA 1..20: ncRNA_class = sgRNA
agaggtggacccttccccaa

SEQ ID NO: 352 - RNA, 20 nt, synthetic construct
  source 1..20: mol_type = other RNA
  ncRNA 1..20: ncRNA_class = sgRNA
tcaaggttgacctggtgctt

SEQ ID NO: 353 - RNA, 20 nt, synthetic construct
  source 1..20: mol_type = other RNA
  ncRNA 1..20: ncRNA_class = sgRNA
ttgacctggtgctttggtac

SEQ ID NO: 354 - RNA, 20 nt, synthetic construct
  source 1..20: mol_type = other RNA
  ncRNA 1..20: ncRNA_class = sgRNA
acaaaattgtaccttttggg

SEQ ID NO: 355 - RNA, 20 nt, synthetic construct
  source 1..20: mol_type = other RNA
  ncRNA 1..20: ncRNA_class = sgRNA
tagaggtggacccttcccca

SEQ ID NO: 356 - RNA, 20 nt, synthetic construct
  source 1..20: mol_type = other RNA
  ncRNA 1..20: ncRNA_class = sgRNA
atggaagagatgactatgtt

SEQ ID NO: 357 - RNA, 20 nt, synthetic construct
  source 1..20: mol_type = other RNA
  ncRNA 1..20: ncRNA_class = sgRNA
tggaagagatgactatgttg

SEQ ID NO: 358 - RNA, 20 nt, synthetic construct
  source 1..20: mol_type = other RNA
  ncRNA 1..20: ncRNA_class = sgRNA
ggctacaagctgttcattta

SEQ ID NO: 359 - RNA, 20 nt, synthetic construct
  source 1..20: mol_type = other RNA
  ncRNA 1..20: ncRNA_class = sgRNA
agagatgactatgttgggga

SEQ ID NO: 360 - RNA, 20 nt, synthetic construct
  source 1..20: mol_type = other RNA
  ncRNA 1..20: ncRNA_class = sgRNA
taagctcttcaaggttgacc

SEQ ID NO: 361 - RNA, 20 nt, synthetic construct
  source 1..20: mol_type = other RNA
  ncRNA 1..20: ncRNA_class = sgRNA
atacagtatgtatgcatcat

SEQ ID NO: 362 - RNA, 20 nt, synthetic construct
  source 1..20: mol_type = other RNA
  ncRNA 1..20: ncRNA_class = sgRNA
tatggaagagatgactatgt

SEQ ID NO: 363 - RNA, 20 nt, synthetic construct
  source 1..20: mol_type = other RNA
  ncRNA 1..20: ncRNA_class = sgRNA
tacaaaattgtaccttttgg

SEQ ID NO: 364 - RNA, 20 nt, synthetic construct
  source 1..20: mol_type = other RNA
  ncRNA 1..20: ncRNA_class = sgRNA
tgtgtttaaagtcttgcctg

SEQ ID NO: 365 - RNA, 20 nt, synthetic construct
  source 1..20: mol_type = other RNA
  ncRNA 1..20: ncRNA_class = sgRNA
aaaaatatctgagttagagg

SEQ ID NO: 366 - RNA, 20 nt, synthetic construct
  source 1..20: mol_type = other RNA
  ncRNA 1..20: ncRNA_class = sgRNA
taaagtcttgcctgaggtct

SEQ ID NO: 367 - RNA, 20 nt, synthetic construct
  source 1..20: mol_type = other RNA
  ncRNA 1..20: ncRNA_class = sgRNA
cacaaaaatatctgagttag

SEQ ID NO: 368 - RNA, 20 nt, synthetic construct
  source 1..20: mol_type = other RNA
  ncRNA 1..20: ncRNA_class = sgRNA
cactgtttttccaagacctc

SEQ ID NO: 369 - RNA, 20 nt, synthetic construct
  source 1..20: mol_type = other RNA
  ncRNA 1..20: ncRNA_class = sgRNA
tttcatctataagctcttca

SEQ ID NO: 370 - RNA, 20 nt, synthetic construct
  source 1..20: mol_type = other RNA
  ncRNA 1..20: ncRNA_class = sgRNA
atacaaaattgtaccttttg

SEQ ID NO: 371 - RNA, 20 nt, synthetic construct
  source 1..20: mol_type = other RNA
  ncRNA 1..20: ncRNA_class = sgRNA
aatacaaaattgtacctttt

SEQ ID NO: 372 - RNA, 20 nt, synthetic construct
  source 1..20: mol_type = other RNA
  ncRNA 1..20: ncRNA_class = sgRNA
gaatacaaaattgtaccttt

SEQ ID NO: 373 - RNA, 20 nt, synthetic construct
  source 1..20: mol_type = other RNA
  ncRNA 1..20: ncRNA_class = sgRNA
attttccctttagcttcaga

SEQ ID NO: 374 - RNA, 20 nt, synthetic construct
  source 1..20: mol_type = other RNA
  ncRNA 1..20: ncRNA_class = sgRNA
gagtccaactaatgagacaa

SEQ ID NO: 375 - RNA, 20 nt, synthetic construct
  source 1..20: mol_type = other RNA
  ncRNA 1..20: ncRNA_class = sgRNA
aaagcagtatcgtattaccc

SEQ ID NO: 376 - RNA, 20 nt, synthetic construct
  source 1..20: mol_type = other RNA
  ncRNA 1..20: ncRNA_class = sgRNA
atgtgactgcagcacataag

SEQ ID NO: 377 - RNA, 20 nt, synthetic construct
  source 1..20: mol_type = other RNA
  ncRNA 1..20: ncRNA_class = sgRNA
gacattactattgtgcagta

SEQ ID NO: 378 - RNA, 20 nt, synthetic construct
  source 1..20: mol_type = other RNA
  ncRNA 1..20: ncRNA_class = sgRNA
gaaagcagtatcgtattacc

SEQ ID NO: 379 - RNA, 20 nt, synthetic construct
  source 1..20: mol_type = other RNA
  ncRNA 1..20: ncRNA_class = sgRNA
agtgagaagttctataaccc

SEQ ID NO: 380 - RNA, 20 nt, synthetic construct
  source 1..20: mol_type = other RNA
  ncRNA 1..20: ncRNA_class = sgRNA
gagtgagaagttctataacc

SEQ ID NO: 381 - RNA, 20 nt, synthetic construct
  source 1..20: mol_type = other RNA
  ncRNA 1..20: ncRNA_class = sgRNA
tgatgaagacgacccagtgt

SEQ ID NO: 382 - RNA, 20 nt, synthetic construct
  source 1..20: mol_type = other RNA
  ncRNA 1..20: ncRNA_class = sgRNA
actttggtttgttcccgcta

SEQ ID NO: 383 - RNA, 20 nt, synthetic construct
  source 1..20: mol_type = other RNA
  ncRNA 1..20: ncRNA_class = sgRNA
tcccgaatcctctaccttag

SEQ ID NO: 384 - RNA, 20 nt, synthetic construct
  source 1..20: mol_type = other RNA
  ncRNA 1..20: ncRNA_class = sgRNA
cagttgatctgcaatgtcag

SEQ ID NO: 385 - RNA, 20 nt, synthetic construct
  source 1..20: mol_type = other RNA
  ncRNA 1..20: ncRNA_class = sgRNA
tatctatggaagtagactcc

SEQ ID NO: 386 - RNA, 20 nt, synthetic construct
  source 1..20: mol_type = other RNA
  ncRNA 1..20: ncRNA_class = sgRNA
tggaagcaagtctgggtaag

SEQ ID NO: 387 - RNA, 20 nt, synthetic construct
  source 1..20: mol_type = other RNA
  ncRNA 1..20: ncRNA_class = sgRNA
attgcagatcaactgtagcc

SEQ ID NO: 388 - RNA, 20 nt, synthetic construct
  source 1..20: mol_type = other RNA
  ncRNA 1..20: ncRNA_class = sgRNA
cttaacccgaatgaaaagaa

SEQ ID NO: 389 - RNA, 20 nt, synthetic construct
  source 1..20: mol_type = other RNA
  ncRNA 1..20: ncRNA_class = sgRNA
cagcaagacacctatatcta

SEQ ID NO: 390 - RNA, 20 nt, synthetic construct
  source 1..20: mol_type = other RNA
  ncRNA 1..20: ncRNA_class = sgRNA
atgagttacccaaaatacag

SEQ ID NO: 391 - RNA, 20 nt, synthetic construct
  source 1..20: mol_type = other RNA
  ncRNA 1..20: ncRNA_class = sgRNA
aatgtgactgcagcacataa

SEQ ID NO: 392 - RNA, 20 nt, synthetic construct
  source 1..20: mol_type = other RNA
  ncRNA 1..20: ncRNA_class = sgRNA
caagcatcctatacatactt

SEQ ID NO: 393 - RNA, 20 nt, synthetic construct
  source 1..20: mol_type = other RNA
  ncRNA 1..20: ncRNA_class = sgRNA
tgaagacgacccagtgttgg

SEQ ID NO: 394 - RNA, 20 nt, synthetic construct
  source 1..20: mol_type = other RNA
  ncRNA 1..20: ncRNA_class = sgRNA
aataatcctccaccaacact

SEQ ID NO: 395 - RNA, 20 nt, synthetic construct
  source 1..20: mol_type = other RNA
  ncRNA 1..20: ncRNA_class = sgRNA
gtttgttcccgctaaggtag

SEQ ID NO: 396 - RNA, 20 nt, synthetic construct
  source 1..20: mol_type = other RNA
  ncRNA 1..20: ncRNA_class = sgRNA
cccgctaaggtagaggattc

SEQ ID NO: 397 - RNA, 20 nt, synthetic construct
  source 1..20: mol_type = other RNA
  ncRNA 1..20: ncRNA_class = sgRNA
cccgaatcctctaccttagc

SEQ ID NO: 398 - RNA, 20 nt, synthetic construct
  source 1..20: mol_type = other RNA
  ncRNA 1..20: ncRNA_class = sgRNA
agttgtccatctcttgcaat

SEQ ID NO: 399 - RNA, 20 nt, synthetic construct
  source 1..20: mol_type = other RNA
  ncRNA 1..20: ncRNA_class = sgRNA
gagacaatggaagcaagtct

SEQ ID NO: 400 - RNA, 20 nt, synthetic construct
  source 1..20: mol_type = other RNA
  ncRNA 1..20: ncRNA_class = sgRNA
tctgcattgtaacacaagtt

SEQ ID NO: 401 - RNA, 20 nt, synthetic construct
  source 1..20: mol_type = other RNA
  ncRNA 1..20: ncRNA_class = sgRNA
aaactacccattgcaagaga

SEQ ID NO: 402 - RNA, 20 nt, synthetic construct
  source 1..20: mol_type = other RNA
  ncRNA 1..20: ncRNA_class = sgRNA
tacattgctttgcaggatcc

SEQ ID NO: 403 - RNA, 20 nt, synthetic construct
  source 1..20: mol_type = other RNA
  ncRNA 1..20: ncRNA_class = sgRNA
gagtctacttccatagatat

SEQ ID NO: 404 - RNA, 20 nt, synthetic construct
  source 1..20: mol_type = other RNA
  ncRNA 1..20: ncRNA_class = sgRNA
tatatccaattgatacatcc

SEQ ID NO: 405 - RNA, 20 nt, synthetic construct
  source 1..20: mol_type = other RNA
  ncRNA 1..20: ncRNA_class = sgRNA
atctgtattcttggctacac

SEQ ID NO: 406 - RNA, 20 nt, synthetic construct
  source 1..20: mol_type = other RNA
  ncRNA 1..20: ncRNA_class = sgRNA
ttcttggctacacaggtaaa

SEQ ID NO: 407 - RNA, 20 nt, synthetic construct
  source 1..20: mol_type = other RNA
  ncRNA 1..20: ncRNA_class = sgRNA
tgtgtagccaagaatacaga

SEQ ID NO: 408 - RNA, 20 nt, synthetic construct
  source 1..20: mol_type = other RNA
  ncRNA 1..20: ncRNA_class = sgRNA
gtttacctggatgtatcaat

SEQ ID NO: 409 - RNA, 20 nt, synthetic construct
  source 1..20: mol_type = other RNA
  ncRNA 1..20: ncRNA_class = sgRNA
gatttcaagaagcacacaat

SEQ ID NO: 410 - RNA, 20 nt, synthetic construct
  source 1..20: mol_type = other RNA
  ncRNA 1..20: ncRNA_class = sgRNA
ttgtgtgcttcttgaaatca

SEQ ID NO: 411 - RNA, 20 nt, synthetic construct
  source 1..20: mol_type = other RNA
  ncRNA 1..20: ncRNA_class = sgRNA
atttataccatctgtattct

SEQ ID NO: 412 - RNA, 20 nt, synthetic construct
  source 1..20: mol_type = other RNA
  ncRNA 1..20: ncRNA_class = sgRNA
attgtgtgcttcttgaaatc

SEQ ID NO: 413 - RNA, 20 nt, synthetic construct
  source 1..20: mol_type = other RNA
  ncRNA 1..20: ncRNA_class = sgRNA
agtacttaatatttcagaag

SEQ ID NO: 414 - RNA, 20 nt, synthetic construct
  source 1..20: mol_type = other RNA
  ncRNA 1..20: ncRNA_class = sgRNA
gtgttctttcttttggttga

SEQ ID NO: 415 - RNA, 20 nt, synthetic construct
  source 1..20: mol_type = other RNA
  ncRNA 1..20: ncRNA_class = sgRNA
gatgattgtgttctttcttt

SEQ ID NO: 416 - RNA, 20 nt, synthetic construct
  source 1..20: mol_type = other RNA
  ncRNA 1..20: ncRNA_class = sgRNA
tggaagggacgcctatgttg

SEQ ID NO: 417 - RNA, 20 nt, synthetic construct
  source 1..20: mol_type = other RNA
  ncRNA 1..20: ncRNA_class = sgRNA
cgaggtggacccttccccaa

SEQ ID NO: 418 - RNA, 20 nt, synthetic construct
  source 1..20: mol_type = other RNA
  ncRNA 1..20: ncRNA_class = sgRNA
atggaagggacgcctatgtt

SEQ ID NO: 419 - RNA, 20 nt, synthetic construct
  source 1..20: mol_type = other RNA
  ncRNA 1..20: ncRNA_class = sgRNA
agggacgcctatgttgggga

SEQ ID NO: 420 - RNA, 20 nt, synthetic construct
  source 1..20: mol_type = other RNA
  ncRNA 1..20: ncRNA_class = sgRNA
actatatccaaagacccttg

SEQ ID NO: 421 - RNA, 20 nt, synthetic construct
  source 1..20: mol_type = other RNA
  ncRNA 1..20: ncRNA_class = sgRNA
gaggtcttggaaaaacagtg

SEQ ID NO: 422 - RNA, 20 nt, synthetic construct
  source 1..20: mol_type = other RNA
  ncRNA 1..20: ncRNA_class = sgRNA
acacataccttccccaacat

SEQ ID NO: 423 - RNA, 20 nt, synthetic construct
  source 1..20: mol_type = other RNA
  ncRNA 1..20: ncRNA_class = sgRNA
tcgaggtggacccttcccca

SEQ ID NO: 424 - RNA, 20 nt, synthetic construct
  source 1..20: mol_type = other RNA
  ncRNA 1..20: ncRNA_class = sgRNA
tgacattgtgctttggtaca

SEQ ID NO: 425 - RNA, 20 nt, synthetic construct
  source 1..20: mol_type = other RNA
  ncRNA 1..20: ncRNA_class = sgRNA
tatggaagggacgcctatgt

SEQ ID NO: 426 - RNA, 20 nt, synthetic construct
  source 1..20: mol_type = other RNA
  ncRNA 1..20: ncRNA_class = sgRNA
tcaaggttgacattgtgctt

SEQ ID NO: 427 - RNA, 20 nt, synthetic construct
  source 1..20: mol_type = other RNA
  ncRNA 1..20: ncRNA_class = sgRNA
acaaagttgtaccttttgga

SEQ ID NO: 428 - RNA, 20 nt, synthetic construct
  source 1..20: mol_type = other RNA
  ncRNA 1..20: ncRNA_class = sgRNA
atactatatccaaagaccct

SEQ ID NO: 429 - RNA, 20 nt, synthetic construct
  source 1..20: mol_type = other RNA
  ncRNA 1..20: ncRNA_class = sgRNA
ataagctgttcatttatgga

SEQ ID NO: 430 - RNA, 20 nt, synthetic construct
  source 1..20: mol_type = other RNA
  ncRNA 1..20: ncRNA_class = sgRNA
tacaaagttgtaccttttgg

SEQ ID NO: 431 - RNA, 20 nt, synthetic construct
  source 1..20: mol_type = other RNA
  ncRNA 1..20: ncRNA_class = sgRNA
aaaaatatctgagttcgagg

SEQ ID NO: 432 - RNA, 20 nt, synthetic construct
  source 1..20: mol_type = other RNA
  ncRNA 1..20: ncRNA_class = sgRNA
ttgacattgtgctttggtac

SEQ ID NO: 433 - RNA, 20 nt, synthetic construct
  source 1..20: mol_type = other RNA
  ncRNA 1..20: ncRNA_class = sgRNA
tactatatccaaagaccctt

SEQ ID NO: 434 - RNA, 20 nt, synthetic construct
  source 1..20: mol_type = other RNA
  ncRNA 1..20: ncRNA_class = sgRNA
tatccaaagacccttgggga

SEQ ID NO: 435 - RNA, 20 nt, synthetic construct
  source 1..20: mol_type = other RNA
  ncRNA 1..20: ncRNA_class = sgRNA
cacaaaaatatctgagttcg

SEQ ID NO: 436 - RNA, 20 nt, synthetic construct
  source 1..20: mol_type = other RNA
  ncRNA 1..20: ncRNA_class = sgRNA
ggatataagctgttcattta

SEQ ID NO: 437 - RNA, 20 nt, synthetic construct
  source 1..20: mol_type = other RNA
  ncRNA 1..20: ncRNA_class = sgRNA
taagctgttcatttatggaa

SEQ ID NO: 438 - RNA, 20 nt, synthetic construct
  source 1..20: mol_type = other RNA
  ncRNA 1..20: ncRNA_class = sgRNA
gacccttccccaagggtctt

SEQ ID NO: 439 - RNA, 20 nt, synthetic construct
  source 1..20: mol_type = other RNA
  ncRNA 1..20: ncRNA_class = sgRNA
tgtgtttaaagtcttgcctg

SEQ ID NO: 440 - RNA, 20 nt, synthetic construct
  source 1..20: mol_type = other RNA
  ncRNA 1..20: ncRNA_class = sgRNA
taaagtcttgcctgaggtct

SEQ ID NO: 441 - RNA, 20 nt, synthetic construct
  source 1..20: mol_type = other RNA
  ncRNA 1..20: ncRNA_class = sgRNA
atccaaagacccttggggaa

SEQ ID NO: 442 - RNA, 20 nt, synthetic construct
  source 1..20: mol_type = other RNA
  ncRNA 1..20: ncRNA_class = sgRNA
atatagtatatatgcatcat

SEQ ID NO: 443 - RNA, 20 nt, synthetic construct
  source 1..20: mol_type = other RNA
  ncRNA 1..20: ncRNA_class = sgRNA
gaatacaaagttgtaccttt

SEQ ID NO: 444 - RNA, 20 nt, synthetic construct
  source 1..20: mol_type = other RNA
  ncRNA 1..20: ncRNA_class = sgRNA
tatgattttctccctccaaa

SEQ ID NO: 445 - RNA, 20 nt, synthetic construct
  source 1..20: mol_type = other RNA
  ncRNA 1..20: ncRNA_class = sgRNA
cactgtttttccaagacctc

SEQ ID NO: 446 - RNA, 20 nt, synthetic construct
  source 1..20: mol_type = other RNA
  ncRNA 1..20: ncRNA_class = sgRNA
actggggactagacaccatg

SEQ ID NO: 447 - RNA, 20 nt, synthetic construct
  source 1..20: mol_type = other RNA
  ncRNA 1..20: ncRNA_class = sgRNA
cagctggccttactctgatc

SEQ ID NO: 448 - RNA, 20 nt, synthetic construct
  source 1..20: mol_type = other RNA
  ncRNA 1..20: ncRNA_class = sgRNA
gatctggtattggactaggc

SEQ ID NO: 449 - RNA, 20 nt, synthetic construct
  source 1..20: mol_type = other RNA
  ncRNA 1..20: ncRNA_class = sgRNA
ccttactaatgcggttctcg

SEQ ID NO: 450 - RNA, 20 nt, synthetic construct
  source 1..20: mol_type = other RNA
  ncRNA 1..20: ncRNA_class = sgRNA
atgcactgggagtttcatgg

SEQ ID NO: 451 - RNA, 20 nt, synthetic construct
  source 1..20: mol_type = other RNA
  ncRNA 1..20: ncRNA_class = sgRNA
tatgcactgggagtttcatg

SEQ ID NO: 452 - RNA, 20 nt, synthetic construct
  source 1..20: mol_type = other RNA
  ncRNA 1..20: ncRNA_class = sgRNA
atatagaatatggcattcag

SEQ ID NO: 453 - RNA, 20 nt, synthetic construct
  source 1..20: mol_type = other RNA
  ncRNA 1..20: ncRNA_class = sgRNA
atagtcggtttgacactgga

SEQ ID NO: 454 - RNA, 20 nt, synthetic construct
  source 1..20: mol_type = other RNA
  ncRNA 1..20: ncRNA_class = sgRNA
agtgatagtcggtttgacac

SEQ ID NO: 455 - RNA, 20 nt, synthetic construct
  source 1..20: mol_type = other RNA
  ncRNA 1..20: ncRNA_class = sgRNA
gaaactcaagttcatacctt

SEQ ID NO: 456 - RNA, 20 nt, synthetic construct
  source 1..20: mol_type = other RNA
  ncRNA 1..20: ncRNA_class = sgRNA
gtggtctatgagaaagaacc

SEQ ID NO: 457 - RNA, 20 nt, synthetic construct
  source 1..20: mol_type = other RNA
  ncRNA 1..20: ncRNA_class = sgRNA
ggagctactcattccctgta

SEQ ID NO: 458 - RNA, 20 nt, synthetic construct
  source 1..20: mol_type = other RNA
  ncRNA 1..20: ncRNA_class = sgRNA
aaactaaaatagaccgtaca

SEQ ID NO: 459 - RNA, 20 nt, synthetic construct
  source 1..20: mol_type = other RNA
  ncRNA 1..20: ncRNA_class = sgRNA
gaggtttggtggaccattga

SEQ ID NO: 460 - RNA, 20 nt, synthetic construct
  source 1..20: mol_type = other RNA
  ncRNA 1..20: ncRNA_class = sgRNA
ttgatgtcaccattaacgaa

SEQ ID NO: 461 - RNA, 20 nt, synthetic construct
  source 1..20: mol_type = other RNA
  ncRNA 1..20: ncRNA_class = sgRNA
gctgcgcttgagatcctcag

SEQ ID NO: 462 - RNA, 20 nt, synthetic construct
  source 1..20: mol_type = other RNA
  ncRNA 1..20: ncRNA_class = sgRNA
gccagtgtcattgaggagag

SEQ ID NO: 463 - RNA, 20 nt, synthetic construct
  source 1..20: mol_type = other RNA
  ncRNA 1..20: ncRNA_class = sgRNA
accgactatcacttggtata

SEQ ID NO: 464 - RNA, 20 nt, synthetic construct
  source 1..20: mol_type = other RNA
  ncRNA 1..20: ncRNA_class = sgRNA
actctgactgtaaaggtagt

SEQ ID NO: 465 - RNA, 20 nt, synthetic construct
  source 1..20: mol_type = other RNA
  ncRNA 1..20: ncRNA_class = sgRNA
tatagttgccagtgtcattg

SEQ ID NO: 466 - RNA, 20 nt, synthetic construct
  source 1..20: mol_type = other RNA
  ncRNA 1..20: ncRNA_class = sgRNA
attctcgcaatgaggtttgg

SEQ ID NO: 467 - RNA, 20 nt, synthetic construct
  source 1..20: mol_type = other RNA
  ncRNA 1..20: ncRNA_class = sgRNA
tccaataccagatcagagta

SEQ ID NO: 468 - RNA, 20 nt, synthetic construct
  source 1..20: mol_type = other RNA
  ncRNA 1..20: ncRNA_class = sgRNA
ggtattggactaggcaggac

SEQ ID NO: 469 - RNA, 20 nt, synthetic construct
  source 1..20: mol_type = other RNA
  ncRNA 1..20: ncRNA_class = sgRNA
tcagagtaaggccagctgaa

SEQ ID NO: 470 - RNA, 20 nt, synthetic construct
  source 1..20: mol_type = other RNA
  ncRNA 1..20: ncRNA_class = sgRNA
tggattctcgcaatgaggtt

SEQ ID NO: 471 - RNA, 20 nt, synthetic construct
  source 1..20: mol_type = other RNA
  ncRNA 1..20: ncRNA_class = sgRNA
ccagtgtcattgaggagagt

SEQ ID NO: 472 - RNA, 20 nt, synthetic construct
  source 1..20: mol_type = other RNA
  ncRNA 1..20: ncRNA_class = sgRNA
gtattggactaggcaggacc

SEQ ID NO: 473 - RNA, 20 nt, synthetic construct
  source 1..20: mol_type = other RNA
  ncRNA 1..20: ncRNA_class = sgRNA
gcaactatacctgcatgtta

SEQ ID NO: 474 - RNA, 20 nt, synthetic construct
  source 1..20: mol_type = other RNA
  ncRNA 1..20: ncRNA_class = sgRNA
gacgtacgtttcatctcacc

SEQ ID NO: 475 - RNA, 20 nt, synthetic construct
  source 1..20: mol_type = other RNA
  ncRNA 1..20: ncRNA_class = sgRNA
tgtcatgctagaagtgccaa

SEQ ID NO: 476 - RNA, 20 nt, synthetic construct
  source 1..20: mol_type = other RNA
  ncRNA 1..20: ncRNA_class = sgRNA
agtgggcacttgatgcgagc

SEQ ID NO: 477 - RNA, 20 nt, synthetic construct
  source 1..20: mol_type = other RNA
  ncRNA 1..20: ncRNA_class = sgRNA
gtaaggagaaagatgtgctg

SEQ ID NO: 478 - RNA, 20 nt, synthetic construct
  source 1..20: mol_type = other RNA
  ncRNA 1..20: ncRNA_class = sgRNA
tcaagaagtgttcaaagagt

SEQ ID NO: 479 - RNA, 20 nt, synthetic construct
  source 1..20: mol_type = other RNA
  ncRNA 1..20: ncRNA_class = sgRNA
gtgtcaaaccgactatcact

SEQ ID NO: 480 - RNA, 20 nt, synthetic construct
  source 1..20: mol_type = other RNA
  ncRNA 1..20: ncRNA_class = sgRNA
ccacatgatcattaggtgaa

SEQ ID NO: 481 - RNA, 20 nt, synthetic construct
  source 1..20: mol_type = other RNA
  ncRNA 1..20: ncRNA_class = sgRNA
catcaagaaagttacctctg

SEQ ID NO: 482 - RNA, 20 nt, synthetic construct
  source 1..20: mol_type = other RNA
  ncRNA 1..20: ncRNA_class = sgRNA
tactaatgcggttctcgggg

SEQ ID NO: 483 - RNA, 20 nt, synthetic construct
  source 1..20: mol_type = other RNA
  ncRNA 1..20: ncRNA_class = sgRNA
taatgcggttctcggggagg

SEQ ID NO: 484 - RNA, 20 nt, synthetic construct
  source 1..20: mol_type = other RNA
  ncRNA 1..20: ncRNA_class = sgRNA
aaaactaaaatagaccgtac

SEQ ID NO: 485 - RNA, 20 nt, synthetic construct
  source 1..20: mol_type = other RNA
  ncRNA 1..20: ncRNA_class = sgRNA
caccaggactctgactgtaa

SEQ ID NO: 486 - RNA, 20 nt, synthetic construct
  source 1..20: mol_type = other RNA
  ncRNA 1..20: ncRNA_class = sgRNA
aaactcaagttcataccttc

SEQ ID NO: 487 - RNA, 20 nt, synthetic construct
  source 1..20: mol_type = other RNA
  ncRNA 1..20: ncRNA_class = sgRNA
tttaataatgtaatacccga

SEQ ID NO: 488 - RNA, 20 nt, synthetic construct
  source 1..20: mol_type = other RNA
  ncRNA 1..20: ncRNA_class = sgRNA
tcggggaggcggaagttaat

SEQ ID NO: 489 - RNA, 20 nt, synthetic construct
  source 1..20: mol_type = other RNA
  ncRNA 1..20: ncRNA_class = sgRNA
tatttgaaattaaggcaatg

SEQ ID NO: 490 - RNA, 20 nt, synthetic construct
  source 1..20: mol_type = other RNA
  ncRNA 1..20: ncRNA_class = sgRNA
ctatatacagtttatgcact

SEQ ID NO: 491 - RNA, 20 nt, synthetic construct
  source 1..20: mol_type = other RNA
  ncRNA 1..20: ncRNA_class = sgRNA
taggcaggaccgggaccttg

SEQ ID NO: 492 - RNA, 20 nt, synthetic construct
  source 1..20: mol_type = other RNA
  ncRNA 1..20: ncRNA_class = sgRNA
ccccgagaaccgcattagta

SEQ ID NO: 493 - RNA, 20 nt, synthetic construct
  source 1..20: mol_type = other RNA
  ncRNA 1..20: ncRNA_class = sgRNA
tacctttacagtcagagtcc

SEQ ID NO: 494 - RNA, 20 nt, synthetic construct
  source 1..20: mol_type = other RNA
  ncRNA 1..20: ncRNA_class = sgRNA
tccttactaatgcggttctc

SEQ ID NO: 495 - RNA, 20 nt, synthetic construct
  source 1..20: mol_type = other RNA
  ncRNA 1..20: ncRNA_class = sgRNA
cccactctcctcaatgacac

SEQ ID NO: 496 - RNA, 20 nt, synthetic construct
  source 1..20: mol_type = other RNA
  ncRNA 1..20: ncRNA_class = sgRNA
ttatgcactgggagtttcat

SEQ ID NO: 497 - RNA, 20 nt, synthetic construct
  source 1..20: mol_type = other RNA
  ncRNA 1..20: ncRNA_class = sgRNA
ctctgatctggtattggact

SEQ ID NO: 498 - RNA, 20 nt, synthetic construct
  source 1..20: mol_type = other RNA
  ncRNA 1..20: ncRNA_class = sgRNA
gttgttacatatccagaaaa

SEQ ID NO: 499 - RNA, 20 nt, synthetic construct
  source 1..20: mol_type = other RNA
  ncRNA 1..20: ncRNA_class = sgRNA
tgtcattgaggagagtgggc

SEQ ID NO: 500 - RNA, 20 nt, synthetic construct
  source 1..20: mol_type = other RNA
  ncRNA 1..20: ncRNA_class = sgRNA
ctggctcatcttcaaacact

SEQ ID NO: 501 - RNA, 20 nt, synthetic construct
  source 1..20: mol_type = other RNA
  ncRNA 1..20: ncRNA_class = sgRNA
ctccttactaatgcggttct

SEQ ID NO: 502 - RNA, 20 nt, synthetic construct
  source 1..20: mol_type = other RNA
  ncRNA 1..20: ncRNA_class = sgRNA
tttatgcactgggagtttca

SEQ ID NO: 503 - RNA, 20 nt, synthetic construct
  source 1..20: mol_type = other RNA
  ncRNA 1..20: ncRNA_class = sgRNA
accatataccaagtgatagt

SEQ ID NO: 504 - RNA, 20 nt, synthetic construct
  source 1..20: mol_type = other RNA
  ncRNA 1..20: ncRNA_class = sgRNA
cagcaaagttgcatttccct

SEQ ID NO: 505 - RNA, 20 nt, synthetic construct
  source 1..20: mol_type = other RNA
  ncRNA 1..20: ncRNA_class = sgRNA
cagagtaaggccagctgaat

SEQ ID NO: 506 - RNA, 20 nt, synthetic construct
  source 1..20: mol_type = other RNA
  ncRNA 1..20: ncRNA_class = sgRNA
tctatatacagtttatgcac

SEQ ID NO: 507 - RNA, 20 nt, synthetic construct
  source 1..20: mol_type = other RNA
  ncRNA 1..20: ncRNA_class = sgRNA
gccttactctgatctggtat

SEQ ID NO: 508 - RNA, 20 nt, synthetic construct
  source 1..20: mol_type = other RNA
  ncRNA 1..20: ncRNA_class = sgRNA
ttcaagaagtgttcaaagag

SEQ ID NO: 509 - RNA, 20 nt, synthetic construct
  source 1..20: mol_type = other RNA
  ncRNA 1..20: ncRNA_class = sgRNA
taattggctcctcaaggtcc

SEQ ID NO: 510 - RNA, 20 nt, synthetic construct
  source 1..20: mol_type = other RNA
  ncRNA 1..20: ncRNA_class = sgRNA
ccattcacctaatgatcatg

SEQ ID NO: 511 - RNA, 20 nt, synthetic construct
  source 1..20: mol_type = other RNA
  ncRNA 1..20: ncRNA_class = sgRNA
catctttctccttactaatg

SEQ ID NO: 512 - RNA, 20 nt, synthetic construct
  source 1..20: mol_type = other RNA
  ncRNA 1..20: ncRNA_class = sgRNA
gtagtgagtctctactttta

SEQ ID NO: 513 - RNA, 20 nt, synthetic construct
  source 1..20: mol_type = other RNA
  ncRNA 1..20: ncRNA_class = sgRNA
aaacacttggatttgcctca

SEQ ID NO: 514 - RNA, 20 nt, synthetic construct
  source 1..20: mol_type = other RNA
  ncRNA 1..20: ncRNA_class = sgRNA
ggaagttaattggctcctca

SEQ ID NO: 515 - RNA, 20 nt, synthetic construct
  source 1..20: mol_type = other RNA
  ncRNA 1..20: ncRNA_class = sgRNA
tacagcacagcccattcagc

SEQ ID NO: 516 - RNA, 20 nt, synthetic construct
  source 1..20: mol_type = other RNA
  ncRNA 1..20: ncRNA_class = sgRNA
atcaggtttttttccatcaa

SEQ ID NO: 517 - RNA, 20 nt, synthetic construct
  source 1..20: mol_type = other RNA
  ncRNA 1..20: ncRNA_class = sgRNA
acagggggcactgcattttt

SEQ ID NO: 518 - RNA, 20 nt, synthetic construct
  source 1..20: mol_type = other RNA
  ncRNA 1..20: ncRNA_class = sgRNA
tctttttgaacaacttccaa

SEQ ID NO: 519 - RNA, 20 nt, synthetic construct
  source 1..20: mol_type = other RNA
  ncRNA 1..20: ncRNA_class = sgRNA
tgaaacgtacgtccattttc

SEQ ID NO: 520 - RNA, 20 nt, synthetic construct
  source 1..20: mol_type = other RNA
  ncRNA 1..20: ncRNA_class = sgRNA
acatcaatagtgatgtcatc

SEQ ID NO: 521 - RNA, 20 nt, synthetic construct
  source 1..20: mol_type = other RNA
  ncRNA 1..20: ncRNA_class = sgRNA
atcacttgtccaaatgtaga

SEQ ID NO: 522 - RNA, 20 nt, synthetic construct
  source 1..20: mol_type = other RNA
  ncRNA 1..20: ncRNA_class = sgRNA
tcatagaccacatgatcatt

SEQ ID NO: 523 - RNA, 20 nt, synthetic construct
  source 1..20: mol_type = other RNA
  ncRNA 1..20: ncRNA_class = sgRNA
ggaaaatatccatctacatt

SEQ ID NO: 524 - RNA, 20 nt, synthetic construct
  source 1..20: mol_type = other RNA
  ncRNA 1..20: ncRNA_class = sgRNA
gtctttttgaacaacttcca

SEQ ID NO: 525 - RNA, 20 nt, synthetic construct
  source 1..20: mol_type = other RNA
  ncRNA 1..20: ncRNA_class = sgRNA
agaaagatgtgctgtggttc

SEQ ID NO: 526 - RNA, 20 nt, synthetic construct
  source 1..20: mol_type = other RNA
  ncRNA 1..20: ncRNA_class = sgRNA
attgccttaatttcaaataa

SEQ ID NO: 527 - RNA, 20 nt, synthetic construct
  source 1..20: mol_type = other RNA
  ncRNA 1..20: ncRNA_class = sgRNA
tgctttggcaacttcgcctt

SEQ ID NO: 528 - RNA, 20 nt, synthetic construct
  source 1..20: mol_type = other RNA
  ncRNA 1..20: ncRNA_class = sgRNA
ctgcttcaccttggctgctt

SEQ ID NO: 529 - RNA, 20 nt, synthetic construct
  source 1..20: mol_type = other RNA
  ncRNA 1..20: ncRNA_class = sgRNA
tgtatcctatgcaaggaatg

SEQ ID NO: 530 - RNA, 20 nt, synthetic construct
  source 1..20: mol_type = other RNA
  ncRNA 1..20: ncRNA_class = sgRNA
tttgtattactgaccctccg

SEQ ID NO: 531 - RNA, 20 nt, synthetic construct
  source 1..20: mol_type = other RNA
  ncRNA 1..20: ncRNA_class = sgRNA
attctccaaaactccacgga

SEQ ID NO: 532 - RNA, 20 nt, synthetic construct
  source 1..20: mol_type = other RNA
  ncRNA 1..20: ncRNA_class = sgRNA
cattctccaaaactccacgg

SEQ ID NO: 533 - RNA, 20 nt, synthetic construct
  source 1..20: mol_type = other RNA
  ncRNA 1..20: ncRNA_class = sgRNA
ttgaccgagacagtctgcct

SEQ ID NO: 534 - RNA, 20 nt, synthetic construct
  source 1..20: mol_type = other RNA
  ncRNA 1..20: ncRNA_class = sgRNA
tgaccgagacagtctgcctg

SEQ ID NO: 535 - RNA, 20 nt, synthetic construct
  source 1..20: mol_type = other RNA
  ncRNA 1..20: ncRNA_class = sgRNA
gaccgagacagtctgcctgg

SEQ ID NO: 536 - RNA, 20 nt, synthetic construct
  source 1..20: mol_type = other RNA
  ncRNA 1..20: ncRNA_class = sgRNA
tggggcttagaacaaccagg

SEQ ID NO: 537 - RNA, 20 nt, synthetic construct
  source 1..20: mol_type = other RNA
  ncRNA 1..20: ncRNA_class = sgRNA
agccccaactacgtgctcca

SEQ ID NO: 538 - RNA, 20 nt, synthetic construct
  source 1..20: mol_type = other RNA
  ncRNA 1..20: ncRNA_class = sgRNA
ctagaaaatatggcctctcg

SEQ ID NO: 539 - RNA, 20 nt, synthetic construct
  source 1..20: mol_type = other RNA
  ncRNA 1..20: ncRNA_class = sgRNA
gacgttgatgttgccccgag

SEQ ID NO: 540 - RNA, 20 nt, synthetic construct
  source 1..20: mol_type = other RNA
  ncRNA 1..20: ncRNA_class = sgRNA
ttccctggagcacgtagttg

SEQ ID NO: 541 - RNA, 20 nt, synthetic construct
  source 1..20: mol_type = other RNA
  ncRNA 1..20: ncRNA_class = sgRNA
agttggggcttagaacaacc

SEQ ID NO: 542 - RNA, 20 nt, synthetic construct
  source 1..20: mol_type = other RNA
  ncRNA 1..20: ncRNA_class = sgRNA
atatttatgtatcctatgca

SEQ ID NO: 543 - RNA, 20 nt, synthetic construct
  source 1..20: mol_type = other RNA
  ncRNA 1..20: ncRNA_class = sgRNA
caaagctgtgaaggaaacga

SEQ ID NO: 544 - RNA, 20 nt, synthetic construct
  source 1..20: mol_type = other RNA
  ncRNA 1..20: ncRNA_class = sgRNA
cctagaaaatatggcctctc

SEQ ID NO: 545 - RNA, 20 nt, synthetic construct
  source 1..20: mol_type = other RNA
  ncRNA 1..20: ncRNA_class = sgRNA
agtacagtacaaagctgtga

SEQ ID NO: 546 - RNA, 20 nt, synthetic construct
  source 1..20: mol_type = other RNA
  ncRNA 1..20: ncRNA_class = sgRNA
aagccccaactacgtgctcc

SEQ ID NO: 547 - RNA, 20 nt, synthetic construct
  source 1..20: mol_type = other RNA
  ncRNA 1..20: ncRNA_class = sgRNA
agagatggtcctattttacc

SEQ ID NO: 548 - RNA, 20 nt, synthetic construct
  source 1..20: mol_type = other RNA
  ncRNA 1..20: ncRNA_class = sgRNA
gccagccttgagctccagga

SEQ ID NO: 549 - RNA, 20 nt, synthetic construct
  source 1..20: mol_type = other RNA
  ncRNA 1..20: ncRNA_class = sgRNA
ttcccccaggcagactgtct

SEQ ID NO: 550 - RNA, 20 nt, synthetic construct
  source 1..20: mol_type = other RNA
  ncRNA 1..20: ncRNA_class = sgRNA
actgaccctccgtggagttt

SEQ ID NO: 551 - RNA, 20 nt, synthetic construct
  source 1..20: mol_type = other RNA
  ncRNA 1..20: ncRNA_class = sgRNA
ggttccctggagcacgtagt

SEQ ID NO: 552 - RNA, 20 nt, synthetic construct
  source 1..20: mol_type = other RNA
  ncRNA 1..20: ncRNA_class = sgRNA
attcattctccaaaactcca

SEQ ID NO: 553 - RNA, 20 nt, synthetic construct
  source 1..20: mol_type = other RNA
  ncRNA 1..20: ncRNA_class = sgRNA
tttgaccgagacagtctgcc

SEQ ID NO: 554 - RNA, 20 nt, synthetic construct
  source 1..20: mol_type = other RNA
  ncRNA 1..20: ncRNA_class = sgRNA
ttcttccgcattccttgcat

SEQ ID NO: 555 - RNA, 20 nt, synthetic construct
  source 1..20: mol_type = other RNA
  ncRNA 1..20: ncRNA_class = sgRNA
tagagatggtcctattttac

SEQ ID NO: 556 - RNA, 20 nt, synthetic construct
  source 1..20: mol_type = other RNA
  ncRNA 1..20: ncRNA_class = sgRNA
gcctagaaaatatggcctct

SEQ ID NO: 557 - RNA, 20 nt, synthetic construct
  source 1..20: mol_type = other RNA
  ncRNA 1..20: ncRNA_class = sgRNA
catctgttccaaaatgagcc

SEQ ID NO: 558 - RNA, 20 nt, synthetic construct
  source 1..20: mol_type = other RNA
  ncRNA 1..20: ncRNA_class = sgRNA
cgaaggtgaaagagctgaag

SEQ ID NO: 559 - RNA, 20 nt, synthetic construct
  source 1..20: mol_type = other RNA
  ncRNA 1..20: ncRNA_class = sgRNA
caaaatgagcccggtaaaat

SEQ ID NO: 560 - RNA, 20 nt, synthetic construct
  source 1..20: mol_type = other RNA
  ncRNA 1..20: ncRNA_class = sgRNA
caaggctggcctagaaaata

SEQ ID NO: 561 - RNA, 20 nt, synthetic construct
  source 1..20: mol_type = other RNA
  ncRNA 1..20: ncRNA_class = sgRNA
cccgagaggccatattttct

SEQ ID NO: 562 - RNA, 20 nt, synthetic construct
  source 1..20: mol_type = other RNA
  ncRNA 1..20: ncRNA_class = sgRNA
tcagaaaagcagacgcctcc

SEQ ID NO: 563 - RNA, 20 nt, synthetic construct
  source 1..20: mol_type = other RNA
  ncRNA 1..20: ncRNA_class = sgRNA
gttccctggagcacgtagtt

SEQ ID NO: 564 - RNA, 20 nt, synthetic construct
  source 1..20: mol_type = other RNA
  ncRNA 1..20: ncRNA_class = sgRNA
ctattttaccgggctcattt

SEQ ID NO: 565 - RNA, 20 nt, synthetic construct
  source 1..20: mol_type = other RNA
  ncRNA 1..20: ncRNA_class = sgRNA
ggaacagatgaaaccatttt

SEQ ID NO: 566 - RNA, 20 nt, synthetic construct
  source 1..20: mol_type = other RNA
  ncRNA 1..20: ncRNA_class = sgRNA
ggccagccttgagctccagg

SEQ ID NO: 567 - RNA, 20 nt, synthetic construct
  source 1..20: mol_type = other RNA
  ncRNA 1..20: ncRNA_class = sgRNA
gaaggtgaaagagctgaaga

SEQ ID NO: 568 - RNA, 20 nt, synthetic construct
  source 1..20: mol_type = other RNA
  ncRNA 1..20: ncRNA_class = sgRNA
ccaggagggcttgggttccc

SEQ ID NO: 569 - RNA, 20 nt, synthetic construct
  source 1..20: mol_type = other RNA
  ncRNA 1..20: ncRNA_class = sgRNA
cttgagctccaggagggctt

SEQ ID NO: 570 - RNA, 20 nt, synthetic construct
  source 1..20: mol_type = other RNA
  ncRNA 1..20: ncRNA_class = sgRNA
gccctcctggagctcaaggc

SEQ ID NO: 571 - RNA, 20 nt, synthetic construct
  source 1..20: mol_type = other RNA
  ncRNA 1..20: ncRNA_class = sgRNA
ccagggaacccaagccctcc

SEQ ID NO: 572 - RNA, 20 nt, synthetic construct
  source 1..20: mol_type = other RNA
  ncRNA 1..20: ncRNA_class = sgRNA
ccaagccctcctggagctca

SEQ ID NO: 573 - RNA, 20 nt, synthetic construct
  source 1..20: mol_type = other RNA
  ncRNA 1..20: ncRNA_class = sgRNA
ccttgagctccaggagggct

SEQ ID NO: 574 - RNA, 20 nt, synthetic construct
  source 1..20: mol_type = other RNA
  ncRNA 1..20: ncRNA_class = sgRNA
cacggtcattaaatggaaag

SEQ ID NO: 575 - RNA, 20 nt, synthetic construct
  source 1..20: mol_type = other RNA
  ncRNA 1..20: ncRNA_class = sgRNA
agtatccacagggcaggttc

SEQ ID NO: 576 - RNA, 20 nt, synthetic construct
  source 1..20: mol_type = other RNA
  ncRNA 1..20: ncRNA_class = sgRNA
cggtgctcacggtcattaaa

SEQ ID NO: 577 - RNA, 20 nt, synthetic construct
  source 1..20: mol_type = other RNA
  ncRNA 1..20: ncRNA_class = sgRNA
gaacctgccctgtggatact

SEQ ID NO: 578 - RNA, 20 nt, synthetic construct
  source 1..20: mol_type = other RNA
  ncRNA 1..20: ncRNA_class = sgRNA
aatccaagtatccacagggc

SEQ ID NO: 579 - RNA, 20 nt, synthetic construct
  source 1..20: mol_type = other RNA
  ncRNA 1..20: ncRNA_class = sgRNA
agagctgaagagggctaaga

SEQ ID NO: 580 - RNA, 20 nt, synthetic construct
  source 1..20: mol_type = other RNA
  ncRNA 1..20: ncRNA_class = sgRNA
tgcttccagaacctgccctg

SEQ ID NO: 581 - RNA, 20 nt, synthetic construct
  source 1..20: mol_type = other RNA
  ncRNA 1..20: ncRNA_class = sgRNA
ctcacggtcattaaatggaa

SEQ ID NO: 582 - RNA, 20 nt, synthetic construct
  source 1..20: mol_type = other RNA
  ncRNA 1..20: ncRNA_class = sgRNA
gagggctaagacggtgctca

SEQ ID NO: 583 - RNA, 20 nt, synthetic construct
  source 1..20: mol_type = other RNA
  ncRNA 1..20: ncRNA_class = sgRNA
ggaaaaatccaagtatccac

SEQ ID NO: 584 - RNA, 20 nt, synthetic construct
  source 1..20: mol_type = other RNA
  ncRNA 1..20: ncRNA_class = sgRNA
gttctggaagcagctgcagg

SEQ ID NO: 585 - RNA, 20 nt, synthetic construct
  source 1..20: mol_type = other RNA
  ncRNA 1..20: ncRNA_class = sgRNA
tcacggtcattaaatggaaa

SEQ ID NO: 586 - RNA, 20 nt, synthetic construct
  source 1..20: mol_type = other RNA
  ncRNA 1..20: ncRNA_class = sgRNA
caggttctggaagcagctgc

SEQ ID NO: 587 - RNA, 20 nt, synthetic construct
  source 1..20: mol_type = other RNA
  ncRNA 1..20: ncRNA_class = sgRNA
gccagctccaagatacacag

SEQ ID NO: 588 - RNA, 20 nt, synthetic construct
  source 1..20: mol_type = other RNA
  ncRNA 1..20: ncRNA_class = sgRNA
tacacagtggaactggcttg

SEQ ID NO: 589 - RNA, 20 nt, synthetic construct
  source 1..20: mol_type = other RNA
  ncRNA 1..20: ncRNA_class = sgRNA
aatcaccactagcaggactg

SEQ ID NO: 590 - RNA, 20 nt, synthetic construct
  source 1..20: mol_type = other RNA
  ncRNA 1..20: ncRNA_class = sgRNA
gccagttccactgtgtatct

SEQ ID NO: 591 - RNA, 20 nt, synthetic construct
  source 1..20: mol_type = other RNA
  ncRNA 1..20: ncRNA_class = sgRNA
gcagccaaggtgaagcagaa

SEQ ID NO: 592 - RNA, 20 nt, synthetic construct
  source 1..20: mol_type = other RNA
  ncRNA 1..20: ncRNA_class = sgRNA
cgaagttgccaaagcagcca

SEQ ID NO: 593 - RNA, 20 nt, synthetic construct
  source 1..20: mol_type = other RNA
  ncRNA 1..20: ncRNA_class = sgRNA
caatgagaatcaccactagc

SEQ ID NO: 594 - RNA, 20 nt, synthetic construct
  source 1..20: mol_type = other RNA
  ncRNA 1..20: ncRNA_class = sgRNA
tggagccacagtcctgctag

SEQ ID NO: 595 - RNA, 20 nt, synthetic construct
  source 1..20: mol_type = other RNA
  ncRNA 1..20: ncRNA_class = sgRNA
tccaagatacacagtggaac

SEQ ID NO: 596 - RNA, 20 nt, synthetic construct
  source 1..20: mol_type = other RNA
  ncRNA 1..20: ncRNA_class = sgRNA
gtggaactggcttgtggttt

SEQ ID NO: 597 - RNA, 20 nt, synthetic construct
  source 1..20: mol_type = other RNA
  ncRNA 1..20: ncRNA_class = sgRNA
tccactgtgtatcttggagc

SEQ ID NO: 598 - RNA, 20 nt, synthetic construct
  source 1..20: mol_type = other RNA
  ncRNA 1..20: ncRNA_class = sgRNA
ccatctctagccagtaaaca

SEQ ID NO: 599 - RNA, 20 nt, synthetic construct
  source 1..20: mol_type = other RNA
  ncRNA 1..20: ncRNA_class = sgRNA
ccatgtttactggctagaga

SEQ ID NO: 600 - RNA, 20 nt, synthetic construct
  source 1..20: mol_type = other RNA
  ncRNA 1..20: ncRNA_class = sgRNA
ttgttgtttaccatgtttac

SEQ ID NO: 601 - RNA, 20 nt, synthetic construct
  source 1..20: mol_type = other RNA
  ncRNA 1..20: ncRNA_class = sgRNA
cggtctagcagtgatgagca

SEQ ID NO: 602 - RNA, 20 nt, synthetic construct
  source 1..20: mol_type = other RNA
  ncRNA 1..20: ncRNA_class = sgRNA
cagtgaagaaaagtcccagg

SEQ ID NO: 603 - RNA, 20 nt, synthetic construct
  source 1..20: mol_type = other RNA
  ncRNA 1..20: ncRNA_class = sgRNA
gcggtctagcagtgatgagc

SEQ ID NO: 604 - RNA, 20 nt, synthetic construct
  source 1..20: mol_type = other RNA
  ncRNA 1..20: ncRNA_class = sgRNA
tcatcactgctagaccgcct

SEQ ID NO: 605 - RNA, 20 nt, synthetic construct
  source 1..20: mol_type = other RNA
  ncRNA 1..20: ncRNA_class = sgRNA
tgccagtgaagaaaagtccc

SEQ ID NO: 606 - RNA, 20 nt, synthetic construct
  source 1..20: mol_type = other RNA
  ncRNA 1..20: ncRNA_class = sgRNA
ctcatcactgctagaccgcc

SEQ ID NO: 607 - RNA, 20 nt, synthetic construct
  source 1..20: mol_type = other RNA
  ncRNA 1..20: ncRNA_class = sgRNA
ttttcaaagatgaatacgag

SEQ ID NO: 608 - RNA, 20 nt, synthetic construct
  source 1..20: mol_type = other RNA
  ncRNA 1..20: ncRNA_class = sgRNA
cgcctgggacttttcttcac

SEQ ID NO: 609 - RNA, 20 nt, synthetic construct
  source 1..20: mol_type = other RNA
  ncRNA 1..20: ncRNA_class = sgRNA
gggacttttcttcactggca

SEQ ID NO: 610 - RNA, 20 nt, synthetic construct
  source 1..20: mol_type = other RNA
  ncRNA 1..20: ncRNA_class = sgRNA
aaaagctattcacttacctg

SEQ ID NO: 611 - RNA, 20 nt, synthetic construct
  source 1..20: mol_type = other RNA
  ncRNA 1..20: ncRNA_class = sgRNA
ccagagcgctgtgatgactg

SEQ ID NO: 612 - RNA, 20 nt, synthetic construct
  source 1..20: mol_type = other RNA
  ncRNA 1..20: ncRNA_class = sgRNA
actggggactagataccatg

SEQ ID NO: 613 - RNA, 20 nt, synthetic construct
  source 1..20: mol_type = other RNA
  ncRNA 1..20: ncRNA_class = sgRNA
agtgggcacttgatgcgagc

SEQ ID NO: 614 - RNA, 20 nt, synthetic construct
  source 1..20: mol_type = other RNA
  ncRNA 1..20: ncRNA_class = sgRNA
tccaataccagatcagagta

SEQ ID NO: 615 - RNA, 20 nt, synthetic construct
  source 1..20: mol_type = other RNA
  ncRNA 1..20: ncRNA_class = sgRNA
cagctggccttactctgatc

SEQ ID NO: 616 - RNA, 20 nt, synthetic construct
  source 1..20: mol_type = other RNA
  ncRNA 1..20: ncRNA_class = sgRNA
gatctggtattggacgaggc

SEQ ID NO: 617 - RNA, 20 nt, synthetic construct
  source 1..20: mol_type = other RNA
  ncRNA 1..20: ncRNA_class = sgRNA
gtattggacgaggcaggacc

SEQ ID NO: 618 - RNA, 20 nt, synthetic construct
  source 1..20: mol_type = other RNA
  ncRNA 1..20: ncRNA_class = sgRNA
tactaatgcggttgtcaggg

SEQ ID NO: 619 - RNA, 20 nt, synthetic construct
  source 1..20: mol_type = other RNA
  ncRNA 1..20: ncRNA_class = sgRNA
cccgtgtcattgaggagggt

SEQ ID NO: 620 - RNA, 20 nt, synthetic construct
  source 1..20: mol_type = other RNA
  ncRNA 1..20: ncRNA_class = sgRNA
gttgcccgtgtcattgagga

SEQ ID NO: 621 - RNA, 20 nt, synthetic construct
  source 1..20: mol_type = other RNA
  ncRNA 1..20: ncRNA_class = sgRNA
agttgcccgtgtcattgagg

SEQ ID NO: 622 - RNA, 20 nt, synthetic construct
  source 1..20: mol_type = other RNA
  ncRNA 1..20: ncRNA_class = sgRNA
tatagttgcccgtgtcattg

SEQ ID NO: 623 - RNA, 20 nt, synthetic construct
  source 1..20: mol_type = other RNA
  ncRNA 1..20: ncRNA_class = sgRNA
cccaccctcctcaatgacac

SEQ ID NO: 624 - RNA, 20 nt, synthetic construct
  source 1..20: mol_type = other RNA
  ncRNA 1..20: ncRNA_class = sgRNA
atcaggctaccttaacatgc

SEQ ID NO: 625 - RNA, 20 nt, synthetic construct
  source 1..20: mol_type = other RNA
  ncRNA 1..20: ncRNA_class = sgRNA
gcaactatacctgcatgtta

SEQ ID NO: 626 - RNA, 20 nt, synthetic construct
  source 1..20: mol_type = other RNA
  ncRNA 1..20: ncRNA_class = sgRNA
atgcagtgggagtttcatgg

SEQ ID NO: 627 - RNA, 20 nt, synthetic construct
  source 1..20: mol_type = other RNA
  ncRNA 1..20: ncRNA_class = sgRNA
catagactgtatatagagta

SEQ ID NO: 628 - RNA, 20 nt, synthetic construct
  source 1..20: mol_type = other RNA
  ncRNA 1..20: ncRNA_class = sgRNA
atagttggtttgacagtggg

SEQ ID NO: 629 - RNA, 20 nt, synthetic construct
  source 1..20: mol_type = other RNA
  ncRNA 1..20: ncRNA_class = sgRNA
gtgatagttggtttgacagt

SEQ ID NO: 630 - RNA, 20 nt, synthetic construct
  source 1..20: mol_type = other RNA
  ncRNA 1..20: ncRNA_class = sgRNA
agtgatagttggtttgacag

SEQ ID NO: 631 - RNA, 20 nt, synthetic construct
  source 1..20: mol_type = other RNA
  ncRNA 1..20: ncRNA_class = sgRNA
accaactatcacttggtaca

SEQ ID NO: 632 - RNA, 20 nt, synthetic construct
  source 1..20: mol_type = other RNA
  ncRNA 1..20: ncRNA_class = sgRNA
taggactctaactgtaaagg

SEQ ID NO: 633 - RNA, 20 nt, synthetic construct
  source 1..20: mol_type = other RNA
  ncRNA 1..20: ncRNA_class = sgRNA
tcattgggtgaatagatctg

SEQ ID NO: 634 - RNA, 20 nt, synthetic construct
  source 1..20: mol_type = other RNA
  ncRNA 1..20: ncRNA_class = sgRNA
gtggtctacgagaaagaacc

SEQ ID NO: 635 - RNA, 20 nt, synthetic construct
  source 1..20: mol_type = other RNA
  ncRNA 1..20: ncRNA_class = sgRNA
cctgaaggacgctcgcaatg

SEQ ID NO: 636 - RNA, 20 nt, synthetic construct
  source 1..20: mol_type = other RNA
  ncRNA 1..20: ncRNA_class = sgRNA
aggacgctcgcaatgaggtt

SEQ ID NO: 637 - RNA, 20 nt, synthetic construct
  source 1..20: mol_type = other RNA
  ncRNA 1..20: ncRNA_class = sgRNA
acgctcgcaatgaggtttgg

SEQ ID NO: 638 - RNA, 20 nt, synthetic construct
  source 1..20: mol_type = other RNA
  ncRNA 1..20: ncRNA_class = sgRNA
gaggtttggtggaccattga

SEQ ID NO: 639 - RNA, 20 nt, synthetic construct
  source 1..20: mol_type = other RNA
  ncRNA 1..20: ncRNA_class = sgRNA
ttgggtgaatagatctgagg

SEQ ID NO: 640 - RNA, 20 nt, synthetic construct
  source 1..20: mol_type = other RNA
  ncRNA 1..20: ncRNA_class = sgRNA
aagtaaaatagactgtacag

SEQ ID NO: 641 - RNA, 20 nt, synthetic construct
  source 1..20: mol_type = other RNA
  ncRNA 1..20: ncRNA_class = sgRNA
ttgatgtaactgttaatgaa

SEQ ID NO: 642 - RNA, 20 nt, synthetic construct
  source 1..20: mol_type = other RNA
  ncRNA 1..20: ncRNA_class = sgRNA
ggcgtatcttccatctgact

SEQ ID NO: 643 - RNA, 20 nt, synthetic construct
  source 1..20: mol_type = other RNA
  ncRNA 1..20: ncRNA_class = sgRNA
gcccgtgtcattgaggaggg

SEQ ID NO: 644 - RNA, 20 nt, synthetic construct
  source 1..20: mol_type = other RNA
  ncRNA 1..20: ncRNA_class = sgRNA
tctatgcagtgggagtttca

SEQ ID NO: 645 - RNA, 20 nt, synthetic construct
  source 1..20: mol_type = other RNA
  ncRNA 1..20: ncRNA_class = sgRNA
atagccttggtttcaaacaa

SEQ ID NO: 646 - RNA, 20 nt, synthetic construct
  source 1..20: mol_type = other RNA
  ncRNA 1..20: ncRNA_class = sgRNA
ttgacaggatgggacttctg

SEQ ID NO: 647 - RNA, 20 nt, synthetic construct
  source 1..20: mol_type = other RNA
  ncRNA 1..20: ncRNA_class = sgRNA
tacctgaggcatcactctgc

SEQ ID NO: 648 - RNA, 20 nt, synthetic construct
  source 1..20: mol_type = other RNA
  ncRNA 1..20: ncRNA_class = sgRNA
tcagagtaaggccagctgaa

SEQ ID NO: 649 - RNA, 20 nt, synthetic construct
  source 1..20: mol_type = other RNA
  ncRNA 1..20: ncRNA_class = sgRNA
ctctgatctggtattggacg

SEQ ID NO: 650 - RNA, 20 nt, synthetic construct
  source 1..20: mol_type = other RNA
  ncRNA 1..20: ncRNA_class = sgRNA
ggtattggacgaggcaggac

SEQ ID NO: 651 - RNA, 20 nt, synthetic construct
  source 1..20: mol_type = other RNA
  ncRNA 1..20: ncRNA_class = sgRNA
ctatcacttggtacatggta

SEQ ID NO: 652 - RNA, 20 nt, synthetic construct
  source 1..20: mol_type = other RNA
  ncRNA 1..20: ncRNA_class = sgRNA
atctccattgtttgaaacca

SEQ ID NO: 653 - RNA, 20 nt, synthetic construct
  source 1..20: mol_type = other RNA
  ncRNA 1..20: ncRNA_class = sgRNA
atctggcttttttccgtcaa

SEQ ID NO: 654 - RNA, 20 nt, synthetic construct
  source 1..20: mol_type = other RNA
  ncRNA 1..20: ncRNA_class = sgRNA
ccccagtcatcacagcgctc

SEQ ID NO: 655 - RNA, 20 nt, synthetic construct
  source 1..20: mol_type = other RNA
  ncRNA 1..20: ncRNA_class = sgRNA
taatgcggttgtcagggagg

SEQ ID NO: 656 - RNA, 20 nt, synthetic construct
  source 1..20: mol_type = other RNA
  ncRNA 1..20: ncRNA_class = sgRNA
ccttactaatgcggttgtca

SEQ ID NO: 657 - RNA, 20 nt, synthetic construct
  source 1..20: mol_type = other RNA
  ncRNA 1..20: ncRNA_class = sgRNA
ccctgacaaccgcattagta

SEQ ID NO: 658 - RNA, 20 nt, synthetic construct
  source 1..20: mol_type = other RNA
  ncRNA 1..20: ncRNA_class = sgRNA
tgtggtctacgagaaagaac

SEQ ID NO: 659 - RNA, 20 nt, synthetic construct
  source 1..20: mol_type = other RNA
  ncRNA 1..20: ncRNA_class = sgRNA
ctggctcatcttcaaacact

SEQ ID NO: 660 - RNA, 20 nt, synthetic construct
  source 1..20: mol_type = other RNA
  ncRNA 1..20: ncRNA_class = sgRNA
tcaagaagtgttcaaagagt

SEQ ID NO: 661 - RNA, 20 nt, synthetic construct
  source 1..20: mol_type = other RNA
  ncRNA 1..20: ncRNA_class = sgRNA
tcagggaggcggaagttaat

SEQ ID NO: 662 - RNA, 20 nt, synthetic construct
  source 1..20: mol_type = other RNA
  ncRNA 1..20: ncRNA_class = sgRNA
ctgtcaaaccaactatcact

SEQ ID NO: 663 - RNA, 20 nt, synthetic construct
  source 1..20: mol_type = other RNA
  ncRNA 1..20: ncRNA_class = sgRNA
gactaggactctaactgtaa

SEQ ID NO: 664 - RNA, 20 nt, synthetic construct
  source 1..20: mol_type = other RNA
  ncRNA 1..20: ncRNA_class = sgRNA
tcgtagaccacaagatcatt

SEQ ID NO: 665 - RNA, 20 nt, synthetic construct
  source 1..20: mol_type = other RNA
  ncRNA 1..20: ncRNA_class = sgRNA
ctcgtagaccacaagatcat

SEQ ID NO: 666 - RNA, 20 nt, synthetic construct
  source 1..20: mol_type = other RNA
  ncRNA 1..20: ncRNA_class = sgRNA
tccagagcgctgtgatgact

SEQ ID NO: 667 - RNA, 20 nt, synthetic construct
  source 1..20: mol_type = other RNA
  ncRNA 1..20: ncRNA_class = sgRNA
gtaaggagaaagatgtgctc

SEQ ID NO: 668 - RNA, 20 nt, synthetic construct
  source 1..20: mol_type = other RNA
  ncRNA 1..20: ncRNA_class = sgRNA
ctatatacagtctatgcagt

SEQ ID NO: 669 - RNA, 20 nt, synthetic construct
  source 1..20: mol_type = other RNA
  ncRNA 1..20: ncRNA_class = sgRNA
tctatatacagtctatgcag

SEQ ID NO: 670 - RNA, 20 nt, synthetic construct
  source 1..20: mol_type = other RNA
  ncRNA 1..20: ncRNA_class = sgRNA
ttgttacatatccagaaaat

SEQ ID NO: 671 - RNA, 20 nt, synthetic construct
  source 1..20: mol_type = other RNA
  ncRNA 1..20: ncRNA_class = sgRNA
ttccagagcgctgtgatgac

SEQ ID NO: 672 - RNA, 20 nt, synthetic construct
  source 1..20: mol_type = other RNA
  ncRNA 1..20: ncRNA_class = sgRNA
cagagtaaggccagctgaat

SEQ ID NO: 673 - RNA, 20 nt, synthetic construct
  source 1..20: mol_type = other RNA
  ncRNA 1..20: ncRNA_class = sgRNA
gccttactctgatctggtat

SEQ ID NO: 674 - RNA, 20 nt, synthetic construct
  source 1..20: mol_type = other RNA
  ncRNA 1..20: ncRNA_class = sgRNA
tccttactaatgcggttgtc

SEQ ID NO: 675 - RNA, 20 nt, synthetic construct
  source 1..20: mol_type = other RNA
  ncRNA 1..20: ncRNA_class = sgRNA
acccaccctcctcaatgaca

SEQ ID NO: 676 - RNA, 20 nt, synthetic construct
  source 1..20: mol_type = other RNA
  ncRNA 1..20: ncRNA_class = sgRNA
accatgtaccaagtgatagt

SEQ ID NO: 677 - RNA, 20 nt, synthetic construct
  source 1..20: mol_type = other RNA
  ncRNA 1..20: ncRNA_class = sgRNA
actctaactgtaaaggtggt

SEQ ID NO: 678 - RNA, 20 nt, synthetic construct
  source 1..20: mol_type = other RNA
  ncRNA 1..20: ncRNA_class = sgRNA
tgaggaggcaatgcgtcttt

SEQ ID NO: 679 - RNA, 20 nt, synthetic construct
  source 1..20: mol_type = other RNA
  ncRNA 1..20: ncRNA_class = sgRNA
aaagtaaaatagactgtaca

SEQ ID NO: 680 - RNA, 20 nt, synthetic construct
  source 1..20: mol_type = other RNA
  ncRNA 1..20: ncRNA_class = sgRNA
cctcattgcgagcgtccttc

SEQ ID NO: 681 - RNA, 20 nt, synthetic construct
  source 1..20: mol_type = other RNA
  ncRNA 1..20: ncRNA_class = sgRNA
aaacacttggatctgcctca

SEQ ID NO: 682 - RNA, 20 nt, synthetic construct
  source 1..20: mol_type = other RNA
  ncRNA 1..20: ncRNA_class = sgRNA
tttaataatgtgatacctga

SEQ ID NO: 683 - RNA, 20 nt, synthetic construct
  source 1..20: mol_type = other RNA
  ncRNA 1..20: ncRNA_class = sgRNA
tggaagatacgcccattttc

SEQ ID NO: 684 - RNA, 20 nt, synthetic construct
  source 1..20: mol_type = other RNA
  ncRNA 1..20: ncRNA_class = sgRNA
gaaagtaaaatagactgtac

SEQ ID NO: 685 - RNA, 20 nt, synthetic construct
  source 1..20: mol_type = other RNA
  ncRNA 1..20: ncRNA_class = sgRNA
atcctgcagagtgatgcctc

SEQ ID NO: 686 - RNA, 20 nt, synthetic construct
  source 1..20: mol_type = other RNA
  ncRNA 1..20: ncRNA_class = sgRNA
tacagcacagcccattcagc

SEQ ID NO: 687 - RNA, 20 nt, synthetic construct
  source 1..20: mol_type = other RNA
  ncRNA 1..20: ncRNA_class = sgRNA
catctttctccttactaatg

SEQ ID NO: 688 - RNA, 20 nt, synthetic construct
  source 1..20: mol_type = other RNA
  ncRNA 1..20: ncRNA_class = sgRNA
tgtcattgaggagggtgggt

SEQ ID NO: 689 - RNA, 20 nt, synthetic construct
  source 1..20: mol_type = other RNA
  ncRNA 1..20: ncRNA_class = sgRNA
tctttctgaaccacttccag

SEQ ID NO: 690 - RNA, 20 nt, synthetic construct
  source 1..20: mol_type = other RNA
  ncRNA 1..20: ncRNA_class = sgRNA
gttgttacatatccagaaaa

SEQ ID NO: 691 - RNA, 20 nt, synthetic construct
  source 1..20: mol_type = other RNA
  ncRNA 1..20: ncRNA_class = sgRNA
ctattcacccaatgatcttg

SEQ ID NO: 692 - RNA, 20 nt, synthetic construct
  source 1..20: mol_type = other RNA
  ncRNA 1..20: ncRNA_class = sgRNA
attaacagttacatcaatac

SEQ ID NO: 693 - RNA, 20 nt, synthetic construct
  source 1..20: mol_type = other RNA
  ncRNA 1..20: ncRNA_class = sgRNA
aaactcaagttcatgccttc

SEQ ID NO: 694 - RNA, 20 nt, synthetic construct
  source 1..20: mol_type = other RNA
  ncRNA 1..20: ncRNA_class = sgRNA
cttgagttttcttatagcct

SEQ ID NO: 695 - RNA, 20 nt, synthetic construct
  source 1..20: mol_type = other RNA
  ncRNA 1..20: ncRNA_class = sgRNA
acatcaatactggtgtcatc

SEQ ID NO: 696 - RNA, 20 nt, synthetic construct
  source 1..20: mol_type = other RNA
  ncRNA 1..20: ncRNA_class = sgRNA
gtgatgagtctctacttcta

SEQ ID NO: 697 - RNA, 20 nt, synthetic construct
  source 1..20: mol_type = other RNA
  ncRNA 1..20: ncRNA_class = sgRNA
taattggctcctccaggtcc

SEQ ID NO: 698 - RNA, 20 nt, synthetic construct
  source 1..20: mol_type = other RNA
  ncRNA 1..20: ncRNA_class = sgRNA
ggaaagaatccatctacatt

SEQ ID NO: 699 - RNA, 20 nt, synthetic construct
  source 1..20: mol_type = other RNA
  ncRNA 1..20: ncRNA_class = sgRNA
tgatgagtctctacttctat

SEQ ID NO: 700 - RNA, 20 nt, synthetic construct
  source 1..20: mol_type = other RNA
  ncRNA 1..20: ncRNA_class = sgRNA
cagttagagtcctagtcaga

SEQ ID NO: 701 - RNA, 20 nt, synthetic construct
  source 1..20: mol_type = other RNA
  ncRNA 1..20: ncRNA_class = sgRNA
gaggcaggaccgggacctgg

SEQ ID NO: 702 - RNA, 20 nt, synthetic construct
  source 1..20: mol_type = other RNA
  ncRNA 1..20: ncRNA_class = sgRNA
atcacatgtccaaatgtaga

SEQ ID NO: 703 - RNA, 20 nt, synthetic construct
  source 1..20: mol_type = other RNA
  ncRNA 1..20: ncRNA_class = sgRNA
ttcaagaagtgttcaaagag

SEQ ID NO: 704 - RNA, 20 nt, synthetic construct
  source 1..20: mol_type = other RNA
  ncRNA 1..20: ncRNA_class = sgRNA
ggaagttaattggctcctcc

SEQ ID NO: 705 - RNA, 20 nt, synthetic construct
  source 1..20: mol_type = other RNA
  ncRNA 1..20: ncRNA_class = sgRNA
cagcaaagttgcatttcctc

SEQ ID NO: 706 - RNA, 20 nt, synthetic construct
  source 1..20: mol_type = other RNA
  ncRNA 1..20: ncRNA_class = sgRNA
agttgcatttcctctggaag

SEQ ID NO: 707 - RNA, 20 nt, synthetic construct
  source 1..20: mol_type = other RNA
  ncRNA 1..20: ncRNA_class = sgRNA
agtctattttactttcctga

SEQ ID NO: 708 - RNA, 20 nt, synthetic construct
  source 1..20: mol_type = other RNA
  ncRNA 1..20: ncRNA_class = sgRNA
gacgaggcaggaccgggacc

SEQ ID NO: 709 - RNA, 20 nt, synthetic construct
  source 1..20: mol_type = other RNA
  ncRNA 1..20: ncRNA_class = sgRNA
taacttgttttttttaggag

SEQ ID NO: 710 - RNA, 20 nt, synthetic construct
  source 1..20: mol_type = other RNA
  ncRNA 1..20: ncRNA_class = sgRNA
tgtcatgctagaaatgccaa

SEQ ID NO: 711 - RNA, 20 nt, synthetic construct
  source 1..20: mol_type = other RNA
  ncRNA 1..20: ncRNA_class = sgRNA
agaggttgacaaagcagcca

SEQ ID NO: 712 - RNA, 20 nt, synthetic construct
  source 1..20: mol_type = other RNA
  ncRNA 1..20: ncRNA_class = sgRNA
tgctagaaatgccaaaggag

SEQ ID NO: 713 - RNA, 20 nt, synthetic construct
  source 1..20: mol_type = other RNA
  ncRNA 1..20: ncRNA_class = sgRNA
attacctttctgcttcacct

SEQ ID NO: 714 - RNA, 20 nt, synthetic construct
  source 1..20: mol_type = other RNA
  ncRNA 1..20: ncRNA_class = sgRNA
tgctttgtcaacctctcctt

SEQ ID NO: 715 - RNA, 20 nt, synthetic construct
  source 1..20: mol_type = other RNA
  ncRNA 1..20: ncRNA_class = sgRNA
catcaaaaaagtttctgctg

SEQ ID NO: 716 - RNA, 20 nt, synthetic construct
  source 1..20: mol_type = other RNA
  ncRNA 1..20: ncRNA_class = sgRNA
atcttacgcaaggaacgctg

SEQ ID NO: 717 - RNA, 20 nt, synthetic construct
  source 1..20: mol_type = other RNA
  ncRNA 1..20: ncRNA_class = sgRNA
tttgtgttactgaccctccg

SEQ ID NO: 718 - RNA, 20 nt, synthetic construct
  source 1..20: mol_type = other RNA
  ncRNA 1..20: ncRNA_class = sgRNA
attctccaaaactccacgga

SEQ ID NO: 719 - RNA, 20 nt, synthetic construct
  source 1..20: mol_type = other RNA
  ncRNA 1..20: ncRNA_class = sgRNA
cattctccaaaactccacgg

SEQ ID NO: 720 - RNA, 20 nt, synthetic construct
  source 1..20: mol_type = other RNA
  ncRNA 1..20: ncRNA_class = sgRNA
ttcccccaggtagactgtca

SEQ ID NO: 721 - RNA, 20 nt, synthetic construct
  source 1..20: mol_type = other RNA
  ncRNA 1..20: ncRNA_class = sgRNA
ttgaccgtgacagtctacct

SEQ ID NO: 722 - RNA, 20 nt, synthetic construct
  source 1..20: mol_type = other RNA
  ncRNA 1..20: ncRNA_class = sgRNA
tgaccgtgacagtctacctg

SEQ ID NO: 723 - RNA, 20 nt, synthetic construct
  source 1..20: mol_type = other RNA
  ncRNA 1..20: ncRNA_class = sgRNA
gaccgtgacagtctacctgg

SEQ ID NO: 724 - RNA, 20 nt, synthetic construct
  source 1..20: mol_type = other RNA
  ncRNA 1..20: ncRNA_class = sgRNA
gtgaaatacctacttccccc

SEQ ID NO: 725 - RNA, 20 nt, synthetic construct
  source 1..20: mol_type = other RNA
  ncRNA 1..20: ncRNA_class = sgRNA
tttgaccgtgacagtctacc

SEQ ID NO: 726 - RNA, 20 nt, synthetic construct
  source 1..20: mol_type = other RNA
  ncRNA 1..20: ncRNA_class = sgRNA
actgaccctccgtggagttt

SEQ ID NO: 727 - RNA, 20 nt, synthetic construct
  source 1..20: mol_type = other RNA
  ncRNA 1..20: ncRNA_class = sgRNA
ggagatggtcttattttacc

SEQ ID NO: 728 - RNA, 20 nt, synthetic construct
  source 1..20: mol_type = other RNA
  ncRNA 1..20: ncRNA_class = sgRNA
atatttatgtatcttacgca

SEQ ID NO: 729 - RNA, 20 nt, synthetic construct
  source 1..20: mol_type = other RNA
  ncRNA 1..20: ncRNA_class = sgRNA
catctgttccaaaatgagcc

SEQ ID NO: 730 - RNA, 20 nt, synthetic construct
  source 1..20: mol_type = other RNA
  ncRNA 1..20: ncRNA_class = sgRNA
attcattctccaaaactcca

SEQ ID NO: 731 - RNA, 20 nt, synthetic construct
  source 1..20: mol_type = other RNA
  ncRNA 1..20: ncRNA_class = sgRNA
tggagatggtcttattttac

SEQ ID NO: 732 - RNA, 20 nt, synthetic construct
  source 1..20: mol_type = other RNA
  ncRNA 1..20: ncRNA_class = sgRNA
ttattttaccgggctcattt

SEQ ID NO: 733 - RNA, 20 nt, synthetic construct
  source 1..20: mol_type = other RNA
  ncRNA 1..20: ncRNA_class = sgRNA
cttccttttgctagatggaa

SEQ ID NO: 734 - RNA, 20 nt, synthetic construct
  source 1..20: mol_type = other RNA
  ncRNA 1..20: ncRNA_class = sgRNA
ccacgtttactggctggaga

SEQ ID NO: 735 - RNA, 20 nt, synthetic construct
  source 1..20: mol_type = other RNA
  ncRNA 1..20: ncRNA_class = sgRNA
ggaacagatgaaaccatttt

SEQ ID NO: 736 - RNA, 20 nt, synthetic construct
  source 1..20: mol_type = other RNA
  ncRNA 1..20: ncRNA_class = sgRNA
ggagttttggagaatgaatt

SEQ ID NO: 737 - RNA, 20 nt, synthetic construct
  source 1..20: mol_type = other RNA
  ncRNA 1..20: ncRNA_class = sgRNA
ctttcattactcacctaaaa

SEQ ID NO: 738 - RNA, 20 nt, synthetic construct
  source 1..20: mol_type = other RNA
  ncRNA 1..20: ncRNA_class = sgRNA
ccatctccagccagtaaacg

SEQ ID NO: 739 - RNA, 20 nt, synthetic construct
  source 1..20: mol_type = other RNA
  ncRNA 1..20: ncRNA_class = sgRNA
tgtttaccacgtttactggc

SEQ ID NO: 740 - RNA, 20 nt, synthetic construct
  source 1..20: mol_type = other RNA
  ncRNA 1..20: ncRNA_class = sgRNA
caatgagaatcactaccagc

SEQ ID NO: 741 - RNA, 20 nt, synthetic construct
  source 1..20: mol_type = other RNA
  ncRNA 1..20: ncRNA_class = sgRNA
ttgttgtttaccacgtttac

SEQ ID NO: 742 - RNA, 20 nt, synthetic construct
  source 1..20: mol_type = other RNA
  ncRNA 1..20: ncRNA_class = sgRNA
ttttggagctacagtcctgc

SEQ ID NO: 743 - RNA, 20 nt, synthetic construct
  source 1..20: mol_type = other RNA
  ncRNA 1..20: ncRNA_class = sgRNA
gatagctccaagatacacag

SEQ ID NO: 744 - RNA, 20 nt, synthetic construct
  source 1..20: mol_type = other RNA
  ncRNA 1..20: ncRNA_class = sgRNA
gctaattccactgtgtatct

SEQ ID NO: 745 - RNA, 20 nt, synthetic construct
  source 1..20: mol_type = other RNA
  ncRNA 1..20: ncRNA_class = sgRNA
tacacagtggaattagcatg

SEQ ID NO: 746 - RNA, 20 nt, synthetic construct
  source 1..20: mol_type = other RNA
  ncRNA 1..20: ncRNA_class = sgRNA
gcagccaaggtgaagcagaa

SEQ ID NO: 747 - RNA, 20 nt, synthetic construct
  source 1..20: mol_type = other RNA
  ncRNA 1..20: ncRNA_class = sgRNA
gtggaattagcatgtggttt

SEQ ID NO: 748 - RNA, 20 nt, synthetic construct
  source 1..20: mol_type = other RNA
  ncRNA 1..20: ncRNA_class = sgRNA
acggttggtttgacactggg

SEQ ID NO: 749 - RNA, 20 nt, synthetic construct
  source 1..20: mol_type = other RNA
  ncRNA 1..20: ncRNA_class = sgRNA
actggggactagataccatg

SEQ ID NO: 750 - RNA, 20 nt, synthetic construct
  source 1..20: mol_type = other RNA
  ncRNA 1..20: ncRNA_class = sgRNA
ccggactctgactgtaaagg

SEQ ID NO: 751 - RNA, 20 nt, synthetic construct
  source 1..20: mol_type = other RNA
  ncRNA 1..20: ncRNA_class = sgRNA
ccagaacgctgcgatgactg

SEQ ID NO: 752 - RNA, 20 nt, synthetic construct
  source 1..20: mol_type = other RNA
  ncRNA 1..20: ncRNA_class = sgRNA
gtgacggttggtttgacact

SEQ ID NO: 753 - RNA, 20 nt, synthetic construct
  source 1..20: mol_type = other RNA
  ncRNA 1..20: ncRNA_class = sgRNA
attaacagttacgtccagag

SEQ ID NO: 754 - RNA, 20 nt, synthetic construct
  source 1..20: mol_type = other RNA
  ncRNA 1..20: ncRNA_class = sgRNA
gtcaggctaccttaacatgc

SEQ ID NO: 755 - RNA, 20 nt, synthetic construct
  source 1..20: mol_type = other RNA
  ncRNA 1..20: ncRNA_class = sgRNA
agtgacggttggtttgacac

SEQ ID NO: 756 - RNA, 20 nt, synthetic construct
  source 1..20: mol_type = other RNA
  ncRNA 1..20: ncRNA_class = sgRNA
ctagggttgtcgtaaaatag

SEQ ID NO: 757 - RNA, 20 nt, synthetic construct
  source 1..20: mol_type = other RNA
  ncRNA 1..20: ncRNA_class = sgRNA
tggacgtaactgttaatgaa

SEQ ID NO: 758 - RNA, 20 nt, synthetic construct
  source 1..20: mol_type = other RNA
  ncRNA 1..20: ncRNA_class = sgRNA
tcatgcctcaggtaagtgaa

SEQ ID NO: 759 - RNA, 20 nt, synthetic construct
  source 1..20: mol_type = other RNA
  ncRNA 1..20: ncRNA_class = sgRNA
cctaccctcctcaatgacac

SEQ ID NO: 760 - RNA, 20 nt, synthetic construct
  source 1..20: mol_type = other RNA
  ncRNA 1..20: ncRNA_class = sgRNA
tgcaactttgctgcaatacg

SEQ ID NO: 761 - RNA, 20 nt, synthetic construct
  source 1..20: mol_type = other RNA
  ncRNA 1..20: ncRNA_class = sgRNA
cagccggactctgactgtaa

SEQ ID NO: 762 - RNA, 20 nt, synthetic construct
  source 1..20: mol_type = other RNA
  ncRNA 1..20: ncRNA_class = sgRNA
gagatttggtggaccattga

SEQ ID NO: 763 - RNA, 20 nt, synthetic construct
  source 1..20: mol_type = other RNA
  ncRNA 1..20: ncRNA_class = sgRNA
gatctggtattggactaggc

SEQ ID NO: 764 - RNA, 20 nt, synthetic construct
  source 1..20: mol_type = other RNA
  ncRNA 1..20: ncRNA_class = sgRNA
gttgcccgtgtcattgagga

SEQ ID NO: 765 - RNA, 20 nt, synthetic construct
  source 1..20: mol_type = other RNA
  ncRNA 1..20: ncRNA_class = sgRNA
agttgcccgtgtcattgagg

SEQ ID NO: 766 - RNA, 20 nt, synthetic construct
  source 1..20: mol_type = other RNA
  ncRNA 1..20: ncRNA_class = sgRNA
tatagttgcccgtgtcattg

SEQ ID NO: 767 - RNA, 20 nt, synthetic construct
  source 1..20: mol_type = other RNA
  ncRNA 1..20: ncRNA_class = sgRNA
accaaccgtcacttggtata

SEQ ID NO: 768 - RNA, 20 nt, synthetic construct
  source 1..20: mol_type = other RNA
  ncRNA 1..20: ncRNA_class = sgRNA
accatataccaagtgacggt

SEQ ID NO: 769 - RNA, 20 nt, synthetic construct
  source 1..20: mol_type = other RNA
  ncRNA 1..20: ncRNA_class = sgRNA
gcttaccatataccaagtga

SEQ ID NO: 770 - RNA, 20 nt, synthetic construct
  source 1..20: mol_type = other RNA
  ncRNA 1..20: ncRNA_class = sgRNA
cagagtccggctgagatgga

SEQ ID NO: 771 - RNA, 20 nt, synthetic construct
  source 1..20: mol_type = other RNA
  ncRNA 1..20: ncRNA_class = sgRNA
actctcgcaatgagatttgg

SEQ ID NO: 772 - RNA, 20 nt, synthetic construct
  source 1..20: mol_type = other RNA
  ncRNA 1..20: ncRNA_class = sgRNA
aaagccagatgacaccactc

SEQ ID NO: 773 - RNA, 20 nt, synthetic construct
  source 1..20: mol_type = other RNA
  ncRNA 1..20: ncRNA_class = sgRNA
agtgggcacttgatgcgagc

SEQ ID NO: 774 - RNA, 20 nt, synthetic construct
  source 1..20: mol_type = other RNA
  ncRNA 1..20: ncRNA_class = sgRNA
gtattggactaggcaggacc

SEQ ID NO: 775 - RNA, 20 nt, synthetic construct
  source 1..20: mol_type = other RNA
  ncRNA 1..20: ncRNA_class = sgRNA
gcaactatacctgcatgtta

SEQ ID NO: 776 - RNA, 20 nt, synthetic construct
  source 1..20: mol_type = other RNA
  ncRNA 1..20: ncRNA_class = sgRNA
atcctgcaaagtcatgcctc

SEQ ID NO: 777 - RNA, 20 nt, synthetic construct
  source 1..20: mol_type = other RNA
  ncRNA 1..20: ncRNA_class = sgRNA
tactaatgcggttctcaggg

SEQ ID NO: 778 - RNA, 20 nt, synthetic construct
  source 1..20: mol_type = other RNA
  ncRNA 1..20: ncRNA_class = sgRNA
gatagctccaagatacacag

SEQ ID NO: 779 - RNA, 20 nt, synthetic construct
  source 1..20: mol_type = other RNA
  ncRNA 1..20: ncRNA_class = sgRNA
tcatgctagaaatgccaaag

SEQ ID NO: 780 - RNA, 20 nt, synthetic construct
  source 1..20: mol_type = other RNA
  ncRNA 1..20: ncRNA_class = sgRNA
gatcaccactagcaggactg

SEQ ID NO: 781 - RNA, 20 nt, synthetic construct
  source 1..20: mol_type = other RNA
  ncRNA 1..20: ncRNA_class = sgRNA
tacacagtggaactggcatg

SEQ ID NO: 782 - RNA, 20 nt, synthetic construct
  source 1..20: mol_type = other RNA
  ncRNA 1..20: ncRNA_class = sgRNA
ggaggttgacaaaccagcca

SEQ ID NO: 783 - RNA, 20 nt, synthetic construct
  source 1..20: mol_type = other RNA
  ncRNA 1..20: ncRNA_class = sgRNA
gtgtatcttggagctatcac

SEQ ID NO: 784 - RNA, 20 nt, synthetic construct
  source 1..20: mol_type = other RNA
  ncRNA 1..20: ncRNA_class = sgRNA
tgctagaaatgccaaagggg

SEQ ID NO: 785 - RNA, 20 nt, synthetic construct
  source 1..20: mol_type = other RNA
  ncRNA 1..20: ncRNA_class = sgRNA
tggtttgtcaacctcccctt

SEQ ID NO: 786 - RNA, 20 nt, synthetic construct
  source 1..20: mol_type = other RNA
  ncRNA 1..20: ncRNA_class = sgRNA
gccagttccactgtgtatct

SEQ ID NO: 787 - RNA, 20 nt, synthetic construct
  source 1..20: mol_type = other RNA
  ncRNA 1..20: ncRNA_class = sgRNA
caatgaggatcaccactagc

SEQ ID NO: 788 - RNA, 20 nt, synthetic construct
  source 1..20: mol_type = other RNA
  ncRNA 1..20: ncRNA_class = sgRNA
agacatggtaaatgacaatg

SEQ ID NO: 789 - RNA, 20 nt, synthetic construct
  source 1..20: mol_type = other RNA
  ncRNA 1..20: ncRNA_class = sgRNA
tggagccacagtcctgctag

SEQ ID NO: 790 - RNA, 20 nt, synthetic construct
  source 1..20: mol_type = other RNA
  ncRNA 1..20: ncRNA_class = sgRNA
agactctaacagaagatgaa

SEQ ID NO: 791 - RNA, 20 nt, synthetic construct
  source 1..20: mol_type = other RNA
  ncRNA 1..20: ncRNA_class = sgRNA
ccagccaaggtgaaacagaa

SEQ ID NO: 792 - RNA, 20 nt, synthetic construct
  source 1..20: mol_type = other RNA
  ncRNA 1..20: ncRNA_class = sgRNA
tgtcatgctagaaatgccaa

SEQ ID NO: 793 - RNA, 20 nt, synthetic construct
  source 1..20: mol_type = other RNA
  ncRNA 1..20: ncRNA_class = sgRNA
attacctttctgtttcacct

SEQ ID NO: 794 - RNA, 20 nt, synthetic construct
  source 1..20: mol_type = other RNA
  ncRNA 1..20: ncRNA_class = sgRNA
gtcatgctagaaatgccaaa

SEQ ID NO: 795 - RNA, 20 nt, synthetic construct
  source 1..20: mol_type = other RNA
  ncRNA 1..20: ncRNA_class = sgRNA
tccaagatacacagtggaac

SEQ ID NO: 796 - RNA, 20 nt, synthetic construct
  source 1..20: mol_type = other RNA
  ncRNA 1..20: ncRNA_class = sgRNA
cctttctgtttcaccttggc

SEQ ID NO: 797 - RNA, 20 nt, synthetic construct
  source 1..20: mol_type = other RNA
  ncRNA 1..20: ncRNA_class = sgRNA
catcaagaaagttactgctg

SEQ ID NO: 798 - RNA, 20 nt, synthetic construct
  source 1..20: mol_type = other RNA
  ncRNA 1..20: ncRNA_class = sgRNA
gtggaactggcatgtggttt

SEQ ID NO: 799 - RNA, 20 nt, synthetic construct
  source 1..20: mol_type = other RNA
  ncRNA 1..20: ncRNA_class = sgRNA
cattctccaaaactccacgg

SEQ ID NO: 800 - RNA, 20 nt, synthetic construct
  source 1..20: mol_type = other RNA
  ncRNA 1..20: ncRNA_class = sgRNA
ttgaccgagacagtctacct

SEQ ID NO: 801 - RNA, 20 nt, synthetic construct
  source 1..20: mol_type = other RNA
  ncRNA 1..20: ncRNA_class = sgRNA
gaccgagacagtctacctgg

SEQ ID NO: 802 - RNA, 20 nt, synthetic construct
  source 1..20: mol_type = other RNA
  ncRNA 1..20: ncRNA_class = sgRNA
tgaccgagacagtctacctg

SEQ ID NO: 803 - RNA, 20 nt, synthetic construct
  source 1..20: mol_type = other RNA
  ncRNA 1..20: ncRNA_class = sgRNA
tttgtattactgaccctccg

SEQ ID NO: 804 - RNA, 20 nt, synthetic construct
  source 1..20: mol_type = other RNA
  ncRNA 1..20: ncRNA_class = sgRNA
attctccaaaactccacgga

SEQ ID NO: 805 - RNA, 20 nt, synthetic construct
  source 1..20: mol_type = other RNA
  ncRNA 1..20: ncRNA_class = sgRNA
catttaccatgtctactggc

SEQ ID NO: 806 - RNA, 20 nt, synthetic construct
  source 1..20: mol_type = other RNA
  ncRNA 1..20: ncRNA_class = sgRNA
atatttatgtatcctatgca

SEQ ID NO: 807 - RNA, 20 nt, synthetic construct
  source 1..20: mol_type = other RNA
  ncRNA 1..20: ncRNA_class = sgRNA
ttcccccaggtagactgtct

SEQ ID NO: 808 - RNA, 20 nt, synthetic construct
  source 1..20: mol_type = other RNA
  ncRNA 1..20: ncRNA_class = sgRNA
tttgaccgagacagtctacc

SEQ ID NO: 809 - RNA, 20 nt, synthetic construct
  source 1..20: mol_type = other RNA
  ncRNA 1..20: ncRNA_class = sgRNA
ctgaaacacctacttccccc

SEQ ID NO: 810 - RNA, 20 nt, synthetic construct
  source 1..20: mol_type = other RNA
  ncRNA 1..20: ncRNA_class = sgRNA
actgaccctccgtggagttt

SEQ ID NO: 811 - RNA, 20 nt, synthetic construct
  source 1..20: mol_type = other RNA
  ncRNA 1..20: ncRNA_class = sgRNA
tggagatggtcctattttac

SEQ ID NO: 812 - RNA, 20 nt, synthetic construct
  source 1..20: mol_type = other RNA
  ncRNA 1..20: ncRNA_class = sgRNA
ggagatggtcctattttacc

SEQ ID NO: 813 - RNA, 20 nt, synthetic construct
  source 1..20: mol_type = other RNA
  ncRNA 1..20: ncRNA_class = sgRNA
catctgttccaaaatgagcc

SEQ ID NO: 814 - RNA, 20 nt, synthetic construct
  source 1..20: mol_type = other RNA
  ncRNA 1..20: ncRNA_class = sgRNA
gttccttttgctagatggga

SEQ ID NO: 815 - RNA, 20 nt, synthetic construct
  source 1..20: mol_type = other RNA
  ncRNA 1..20: ncRNA_class = sgRNA
ccatctccagccagtagaca

SEQ ID NO: 816 - RNA, 20 nt, synthetic construct
  source 1..20: mol_type = other RNA
  ncRNA 1..20: ncRNA_class = sgRNA
caaaatgagcccggtaaaat

SEQ ID NO: 817 - RNA, 20 nt, synthetic construct
  source 1..20: mol_type = other RNA
  ncRNA 1..20: ncRNA_class = sgRNA
ctattttaccgggctcattt

SEQ ID NO: 818 - RNA, 20 nt, synthetic construct
  source 1..20: mol_type = other RNA
  ncRNA 1..20: ncRNA_class = sgRNA
attcattctccaaaactcca

SEQ ID NO: 819 - RNA, 20 nt, synthetic construct
  source 1..20: mol_type = other RNA
  ncRNA 1..20: ncRNA_class = sgRNA
ttcttcagcattccttgcat

SEQ ID NO: 820 - RNA, 20 nt, synthetic construct
  source 1..20: mol_type = other RNA
  ncRNA 1..20: ncRNA_class = sgRNA
cttccattactcacctaaaa

SEQ ID NO: 821 - RNA, 20 nt, synthetic construct
  source 1..20: mol_type = other RNA
  ncRNA 1..20: ncRNA_class = sgRNA
ttgtcatttaccatgtctac

SEQ ID NO: 822 - RNA, 20 nt, synthetic construct
  source 1..20: mol_type = other RNA
  ncRNA 1..20: ncRNA_class = sgRNA
ccatgtctactggctggaga

SEQ ID NO: 823 - RNA, 20 nt, synthetic construct
  source 1..20: mol_type = other RNA
  ncRNA 1..20: ncRNA_class = sgRNA
ggaacagatgaaaccatttt

SEQ ID NO: 824 - RNA, 20 nt, synthetic construct
  source 1..20: mol_type = other RNA
  ncRNA 1..20: ncRNA_class = sgRNA
ggagttttggagaatgaatt

SEQ ID NO: 825 - RNA, 20 nt, synthetic construct
  source 1..20: mol_type = other RNA
  ncRNA 1..20: ncRNA_class = sgRNA
tcattgggtgagtagatctg

SEQ ID NO: 826 - RNA, 20 nt, synthetic construct
  source 1..20: mol_type = other RNA
  ncRNA 1..20: ncRNA_class = sgRNA
atgcactgggagtttcatgg

SEQ ID NO: 827 - RNA, 20 nt, synthetic construct
  source 1..20: mol_type = other RNA
  ncRNA 1..20: ncRNA_class = sgRNA
agtgatggttggtttgacac

SEQ ID NO: 828 - RNA, 20 nt, synthetic construct
  source 1..20: mol_type = other RNA
  ncRNA 1..20: ncRNA_class = sgRNA
atggttggtttgacactgga

SEQ ID NO: 829 - RNA, 20 nt, synthetic construct
  source 1..20: mol_type = other RNA
  ncRNA 1..20: ncRNA_class = sgRNA
cctgaaggatgcccgcaatg

SEQ ID NO: 830 - RNA, 20 nt, synthetic construct
  source 1..20: mol_type = other RNA
  ncRNA 1..20: ncRNA_class = sgRNA
cagagtcctagtgagatgga

SEQ ID NO: 831 - RNA, 20 nt, synthetic construct
  source 1..20: mol_type = other RNA
  ncRNA 1..20: ncRNA_class = sgRNA
gtagtctacgagaaagaacc

SEQ ID NO: 832 - RNA, 20 nt, synthetic construct
  source 1..20: mol_type = other RNA
  ncRNA 1..20: ncRNA_class = sgRNA
atgcccgcaatgaggtttgg

SEQ ID NO: 833 - RNA, 20 nt, synthetic construct
  source 1..20: mol_type = other RNA
  ncRNA 1..20: ncRNA_class = sgRNA
tgcaactttgctgcaatacg

SEQ ID NO: 834 - RNA, 20 nt, synthetic construct
  source 1..20: mol_type = other RNA
  ncRNA 1..20: ncRNA_class = sgRNA
ttgggtgagtagatctgagg

SEQ ID NO: 835 - RNA, 20 nt, synthetic construct
  source 1..20: mol_type = other RNA
  ncRNA 1..20: ncRNA_class = sgRNA
tggtccaccaaacctcattg

SEQ ID NO: 836 - RNA, 20 nt, synthetic construct
  source 1..20: mol_type = other RNA
  ncRNA 1..20: ncRNA_class = sgRNA
gaggtttggtggaccattga

SEQ ID NO: 837 - RNA, 20 nt, synthetic construct
  source 1..20: mol_type = other RNA
  ncRNA 1..20: ncRNA_class = sgRNA
gcttaccatataccaagtga

SEQ ID NO: 838 - RNA, 20 nt, synthetic construct
  source 1..20: mol_type = other RNA
  ncRNA 1..20: ncRNA_class = sgRNA
aggatgcccgcaatgaggtt

SEQ ID NO: 839 - RNA, 20 nt, synthetic construct
  source 1..20: mol_type = other RNA
  ncRNA 1..20: ncRNA_class = sgRNA
ggtccaccaaacctcattgc

SEQ ID NO: 840 - RNA, 20 nt, synthetic construct
  source 1..20: mol_type = other RNA
  ncRNA 1..20: ncRNA_class = sgRNA
ttgatgtaactgtcaatgaa

SEQ ID NO: 841 - RNA, 20 nt, synthetic construct
  source 1..20: mol_type = other RNA
  ncRNA 1..20: ncRNA_class = sgRNA
accaaccatcacttggtata

SEQ ID NO: 842 - RNA, 20 nt, synthetic construct
  source 1..20: mol_type = other RNA
  ncRNA 1..20: ncRNA_class = sgRNA
aagtaaaatagactgtacaa

SEQ ID NO: 843 - RNA, 20 nt, synthetic construct
  source 1..20: mol_type = other RNA
  ncRNA 1..20: ncRNA_class = sgRNA
ctatatatagtctatgcact

SEQ ID NO: 844 - RNA, 20 nt, synthetic construct
  source 1..20: mol_type = other RNA
  ncRNA 1..20: ncRNA_class = sgRNA
accatataccaagtgatggt

SEQ ID NO: 845 - RNA, 20 nt, synthetic construct
  source 1..20: mol_type = other RNA
  ncRNA 1..20: ncRNA_class = sgRNA
ggcgtaccttccatctcact

SEQ ID NO: 846 - RNA, 20 nt, synthetic construct
  source 1..20: mol_type = other RNA
  ncRNA 1..20: ncRNA_class = sgRNA
agaagatgaaacgagaactc

SEQ ID NO: 847 - RNA, 20 nt, synthetic construct
  source 1..20: mol_type = other RNA
  ncRNA 1..20: ncRNA_class = sgRNA
tctatgcactgggagtttca

SEQ ID NO: 848 - RNA, 20 nt, synthetic construct
  source 1..20: mol_type = other RNA
  ncRNA 1..20: ncRNA_class = sgRNA
tctatatatagtctatgcac

SEQ ID NO: 849 - RNA, 20 nt, synthetic construct
  source 1..20: mol_type = other RNA
  ncRNA 1..20: ncRNA_class = sgRNA
atagccttggtttcaaacaa

SEQ ID NO: 850 - RNA, 20 nt, synthetic construct
  source 1..20: mol_type = other RNA
  ncRNA 1..20: ncRNA_class = sgRNA
atctccattgtttgaaacca

SEQ ID NO: 851 - RNA, 20 nt, synthetic construct
  source 1..20: mol_type = other RNA
  ncRNA 1..20: ncRNA_class = sgRNA
ttgttacatatccagaaaac

SEQ ID NO: 852 - RNA, 20 nt, synthetic construct
  source 1..20: mol_type = other RNA
  ncRNA 1..20: ncRNA_class = sgRNA
cagtcagagtcctagtgaga

SEQ ID NO: 853 - RNA, 20 nt, synthetic construct
  source 1..20: mol_type = other RNA
  ncRNA 1..20: ncRNA_class = sgRNA
taggactctgactgtgaagg

SEQ ID NO: 854 - RNA, 20 nt, synthetic construct
  source 1..20: mol_type = other RNA
  ncRNA 1..20: ncRNA_class = sgRNA
atcaggctaccttaacatgc

SEQ ID NO: 855 - RNA, 20 nt, synthetic construct
  source 1..20: mol_type = other RNA
  ncRNA 1..20: ncRNA_class = sgRNA
gatagctccaagatacacag

SEQ ID NO: 856 - RNA, 20 nt, synthetic construct
  source 1..20: mol_type = other RNA
  ncRNA 1..20: ncRNA_class = sgRNA
gatcactaccagcagcactg

SEQ ID NO: 857 - RNA, 20 nt, synthetic construct
  source 1..20: mol_type = other RNA
  ncRNA 1..20: ncRNA_class = sgRNA
tcatgctagaaatgccaaag

SEQ ID NO: 858 - RNA, 20 nt, synthetic construct
  source 1..20: mol_type = other RNA
  ncRNA 1..20: ncRNA_class = sgRNA
tacacagtggaattagcatg

SEQ ID NO: 859 - RNA, 20 nt, synthetic construct
  source 1..20: mol_type = other RNA
  ncRNA 1..20: ncRNA_class = sgRNA
aaacatggtaaacaacaatg

SEQ ID NO: 860 - RNA, 20 nt, synthetic construct
  source 1..20: mol_type = other RNA
  ncRNA 1..20: ncRNA_class = sgRNA
tggtttgtcaacctcccctt

SEQ ID NO: 861 - RNA, 20 nt, synthetic construct
  source 1..20: mol_type = other RNA
  ncRNA 1..20: ncRNA_class = sgRNA
ggaggttgacaaaccagcca

SEQ ID NO: 862 - RNA, 20 nt, synthetic construct
  source 1..20: mol_type = other RNA
  ncRNA 1..20: ncRNA_class = sgRNA
tgctagaaatgccaaagggg

SEQ ID NO: 863 - RNA, 20 nt, synthetic construct
  source 1..20: mol_type = other RNA
  ncRNA 1..20: ncRNA_class = sgRNA
gtcatgctagaaatgccaaa

SEQ ID NO: 864 - RNA, 20 nt, synthetic construct
  source 1..20: mol_type = other RNA
  ncRNA 1..20: ncRNA_class = sgRNA
gctaattccactgtgtatct

SEQ ID NO: 865 - RNA, 20 nt, synthetic construct
  source 1..20: mol_type = other RNA
  ncRNA 1..20: ncRNA_class = sgRNA
tgtcatgctagaaatgccaa

SEQ ID NO: 866 - RNA, 20 nt, synthetic construct
  source 1..20: mol_type = other RNA
  ncRNA 1..20: ncRNA_class = sgRNA
ccagccaaggtgaaacagaa

SEQ ID NO: 867 - RNA, 20 nt, synthetic construct
  source 1..20: mol_type = other RNA
  ncRNA 1..20: ncRNA_class = sgRNA
attacctttctgtttcacct

SEQ ID NO: 868 - RNA, 20 nt, synthetic construct
  source 1..20: mol_type = other RNA
  ncRNA 1..20: ncRNA_class = sgRNA
gtggaattagcatgtggttt

SEQ ID NO: 869 - RNA, 20 nt, synthetic construct
  source 1..20: mol_type = other RNA
  ncRNA 1..20: ncRNA_class = sgRNA
cctttctgtttcaccttggc

SEQ ID NO: 870 - RNA, 20 nt, synthetic construct
  source 1..20: mol_type = other RNA
  ncRNA 1..20: ncRNA_class = sgRNA
aaggtgaaacagaaaggtaa

SEQ ID NO: 871 - RNA, 20 nt, synthetic construct
  source 1..20: mol_type = other RNA
  ncRNA 1..20: ncRNA_class = sgRNA
catcaaaaaagttactgctg

SEQ ID NO: 872 - RNA, 20 nt, synthetic construct
  source 1..20: mol_type = other RNA
  ncRNA 1..20: ncRNA_class = sgRNA
ttttggagccacagtgctgc

SEQ ID NO: 873 - RNA, 20 nt, synthetic construct
  source 1..20: mol_type = other RNA
  ncRNA 1..20: ncRNA_class = sgRNA
cattctccaaaactccacgg

SEQ ID NO: 874 - RNA, 20 nt, synthetic construct
  source 1..20: mol_type = other RNA
  ncRNA 1..20: ncRNA_class = sgRNA
attctccaaaactccacgga

SEQ ID NO: 875 - RNA, 20 nt, synthetic construct
  source 1..20: mol_type = other RNA
  ncRNA 1..20: ncRNA_class = sgRNA
tttgtgttactgaccctccg

SEQ ID NO: 876 - RNA, 20 nt, synthetic construct
  source 1..20: mol_type = other RNA
  ncRNA 1..20: ncRNA_class = sgRNA
ttgaccgtgacagtctgcct

SEQ ID NO: 877 - RNA, 20 nt, synthetic construct
  source 1..20: mol_type = other RNA
  ncRNA 1..20: ncRNA_class = sgRNA
atcttacgcaaggaatgctg

SEQ ID NO: 878 - RNA, 20 nt, synthetic construct
  source 1..20: mol_type = other RNA
  ncRNA 1..20: ncRNA_class = sgRNA
tgaccgtgacagtctgcctg

SEQ ID NO: 879 - RNA, 20 nt, synthetic construct
  source 1..20: mol_type = other RNA
  ncRNA 1..20: ncRNA_class = sgRNA
gaccgtgacagtctgcctgg

SEQ ID NO: 880 - RNA, 20 nt, synthetic construct
  source 1..20: mol_type = other RNA
  ncRNA 1..20: ncRNA_class = sgRNA
gtgagatacctacttccccc

SEQ ID NO: 881 - RNA, 20 nt, synthetic construct
  source 1..20: mol_type = other RNA
  ncRNA 1..20: ncRNA_class = sgRNA
actgaccctccgtggagttt

SEQ ID NO: 882 - RNA, 20 nt, synthetic construct
  source 1..20: mol_type = other RNA
  ncRNA 1..20: ncRNA_class = sgRNA
ttcccccaggcagactgtca

SEQ ID NO: 883 - RNA, 20 nt, synthetic construct
  source 1..20: mol_type = other RNA
  ncRNA 1..20: ncRNA_class = sgRNA
tgtttaccatgtttactggc

SEQ ID NO: 884 - RNA, 20 nt, synthetic construct
  source 1..20: mol_type = other RNA
  ncRNA 1..20: ncRNA_class = sgRNA
ccatctccagccagtaaaca

SEQ ID NO: 885 - RNA, 20 nt, synthetic construct
  source 1..20: mol_type = other RNA
  ncRNA 1..20: ncRNA_class = sgRNA
atatttatgtatcttacgca

SEQ ID NO: 886 - RNA, 20 nt, synthetic construct
  source 1..20: mol_type = other RNA
  ncRNA 1..20: ncRNA_class = sgRNA
tttgaccgtgacagtctgcc

SEQ ID NO: 887 - RNA, 20 nt, synthetic construct
  source 1..20: mol_type = other RNA
  ncRNA 1..20: ncRNA_class = sgRNA
catctgttccaaaatgagcc

SEQ ID NO: 888 - RNA, 20 nt, synthetic construct
  source 1..20: mol_type = other RNA
  ncRNA 1..20: ncRNA_class = sgRNA
ggagatggtcttattttacc

SEQ ID NO: 889 - RNA, 20 nt, synthetic construct
  source 1..20: mol_type = other RNA
  ncRNA 1..20: ncRNA_class = sgRNA
attcattctccaaaactcca

SEQ ID NO: 890 - RNA, 20 nt, synthetic construct
  source 1..20: mol_type = other RNA
  ncRNA 1..20: ncRNA_class = sgRNA
tggagatggtcttattttac

SEQ ID NO: 891 - RNA, 20 nt, synthetic construct
  source 1..20: mol_type = other RNA
  ncRNA 1..20: ncRNA_class = sgRNA
ttattttaccgggctcattt

SEQ ID NO: 892 - RNA, 20 nt, synthetic construct
  source 1..20: mol_type = other RNA
  ncRNA 1..20: ncRNA_class = sgRNA
actctttcccatctggcaaa

SEQ ID NO: 893 - RNA, 20 nt, synthetic construct
  source 1..20: mol_type = other RNA
  ncRNA 1..20: ncRNA_class = sgRNA
atatcatactctttcccatc

SEQ ID NO: 894 - RNA, 20 nt, synthetic construct
  source 1..20: mol_type = other RNA
  ncRNA 1..20: ncRNA_class = sgRNA
cgttcattactcacctaaaa

SEQ ID NO: 895 - RNA, 20 nt, synthetic construct
  source 1..20: mol_type = other RNA
  ncRNA 1..20: ncRNA_class = sgRNA
ttgttgtttaccatgtttac

SEQ ID NO: 896 - RNA, 20 nt, synthetic construct
  source 1..20: mol_type = other RNA
  ncRNA 1..20: ncRNA_class = sgRNA
ggaacagatgaaaccatttt

SEQ ID NO: 897 - RNA, 20 nt, synthetic construct
  source 1..20: mol_type = other RNA
  ncRNA 1..20: ncRNA_class = sgRNA
ctttcttccttttgccagat

SEQ ID NO: 898 - RNA, 20 nt, synthetic construct
  source 1..20: mol_type = other RNA
  ncRNA 1..20: ncRNA_class = sgRNA
ggagttttggagaatgaatt

SEQ ID NO: 899 - RNA, 20 nt, synthetic construct
  source 1..20: mol_type = other RNA
  ncRNA 1..20: ncRNA_class = sgRNA
ccatgtttactggctggaga

SEQ ID NO: 900 - RNA, 20 nt, synthetic construct
  source 1..20: mol_type = other RNA
  ncRNA 1..20: ncRNA_class = sgRNA
tctttcttccttttgccaga

SEQ ID NO: 901 - RNA, 20 nt, synthetic construct
  source 1..20: mol_type = other RNA
  ncRNA 1..20: ncRNA_class = sgRNA
ttgacttaattcctcgagat

SEQ ID NO: 902 - RNA, 20 nt, synthetic construct
  source 1..20: mol_type = other RNA
  ncRNA 1..20: ncRNA_class = sgRNA
gttgtgtataactttgtctg

SEQ ID NO: 903 - RNA, 20 nt, synthetic construct
  source 1..20: mol_type = other RNA
  ncRNA 1..20: ncRNA_class = sgRNA
catacaaacggcctatctcg

SEQ ID NO: 904 - RNA, 20 nt, synthetic construct
  source 1..20: mol_type = other RNA
  ncRNA 1..20: ncRNA_class = sgRNA
cggtcgctgctccgcgtccc

SEQ ID NO: 905 - RNA, 20 nt, synthetic construct
  source 1..20: mol_type = other RNA
  ncRNA 1..20: ncRNA_class = sgRNA
gtgcaccctcttcaaaaact

SEQ ID NO: 906 - RNA, 20 nt, synthetic construct
  source 1..20: mol_type = other RNA
  ncRNA 1..20: ncRNA_class = sgRNA
gctgctcctcctcgtgctgg

SEQ ID NO: 907 - RNA, 20 nt, synthetic construct
  source 1..20: mol_type = other RNA
  ncRNA 1..20: ncRNA_class = sgRNA
attttacttgtgtgacagat

SEQ ID NO: 908 - RNA, 20 nt, synthetic construct
  source 1..20: mol_type = other RNA
  ncRNA 1..20: ncRNA_class = sgRNA
ccgccgccgccgccagcacg

SEQ ID NO: 909 - RNA, 20 nt, synthetic construct
  source 1..20: mol_type = other RNA
  ncRNA 1..20: ncRNA_class = sgRNA
ccgccgccgccagcacgagg

SEQ ID NO: 910 - RNA, 20 nt, synthetic construct
  source 1..20: mol_type = other RNA
  ncRNA 1..20: ncRNA_class = sgRNA
gctcctcctcgtgctggcgg

SEQ ID NO: 911 - RNA, 20 nt, synthetic construct
  source 1..20: mol_type = other RNA
  ncRNA 1..20: ncRNA_class = sgRNA
agcacgaggaggagcagccg

SEQ ID NO: 912 - RNA, 20 nt, synthetic construct
  source 1..20: mol_type = other RNA
  ncRNA 1..20: ncRNA_class = sgRNA
gaagagggtgcacatacaaa

SEQ ID NO: 913 - RNA, 20 nt, synthetic construct
  source 1..20: mol_type = other RNA
  ncRNA 1..20: ncRNA_class = sgRNA
taaaattgtcttttgtacag

SEQ ID NO: 914 - RNA, 20 nt, synthetic construct
  source 1..20: mol_type = other RNA
  ncRNA 1..20: ncRNA_class = sgRNA
tacaacatattgctgcaatc

SEQ ID NO: 915 - RNA, 20 nt, synthetic construct
  source 1..20: mol_type = other RNA
  ncRNA 1..20: ncRNA_class = sgRNA
aattgtcttttgtacagagg

SEQ ID NO: 916 - RNA, 20 nt, synthetic construct
  source 1..20: mol_type = other RNA
  ncRNA 1..20: ncRNA_class = sgRNA
aattttacttgtgtgacaga

SEQ ID NO: 917 - RNA, 20 nt, synthetic construct
  source 1..20: mol_type = other RNA
  ncRNA 1..20: ncRNA_class = sgRNA
ggcggcggcgctgctcccgg

SEQ ID NO: 918 - RNA, 20 nt, synthetic construct
  source 1..20: mol_type = other RNA
  ncRNA 1..20: ncRNA_class = sgRNA
aggaggagcagccggggacg

SEQ ID NO: 919 - RNA, 20 nt, synthetic construct
  source 1..20: mol_type = other RNA
  ncRNA 1..20: ncRNA_class = sgRNA
gcggcggcggcgctgctccc

SEQ ID NO: 920 - RNA, 20 nt, synthetic construct
  source 1..20: mol_type = other RNA
  ncRNA 1..20: ncRNA_class = sgRNA
cggcggcggcgctgctcccg

SEQ ID NO: 921 - RNA, 20 nt, synthetic construct
  source 1..20: mol_type = other RNA
  ncRNA 1..20: ncRNA_class = sgRNA
tgtgcaccctcttcaaaaac

SEQ ID NO: 922 - RNA, 20 nt, synthetic construct
  source 1..20: mol_type = other RNA
  ncRNA 1..20: ncRNA_class = sgRNA
cagcacgaggaggagcagcc

SEQ ID NO: 923 - RNA, 20 nt, synthetic construct
  source 1..20: mol_type = other RNA
  ncRNA 1..20: ncRNA_class = sgRNA
acagacccagtttttgaaga

SEQ ID NO: 924 - RNA, 20 nt, synthetic construct
  source 1..20: mol_type = other RNA
  ncRNA 1..20: ncRNA_class = sgRNA
cacagacccagtttttgaag

SEQ ID NO: 925 - RNA, 20 nt, synthetic construct
  source 1..20: mol_type = other RNA
  ncRNA 1..20: ncRNA_class = sgRNA
ccggctgctcctcctcgtgc

SEQ ID NO: 926 - RNA, 20 nt, synthetic construct
  source 1..20: mol_type = other RNA
  ncRNA 1..20: ncRNA_class = sgRNA
ggcgctgctcccgggggcga

SEQ ID NO: 927 - RNA, 20 nt, synthetic construct
  source 1..20: mol_type = other RNA
  ncRNA 1..20: ncRNA_class = sgRNA
cctcctcgtgctggcggcgg

SEQ ID NO: 928 - RNA, 20 nt, synthetic construct
  source 1..20: mol_type = other RNA
  ncRNA 1..20: ncRNA_class = sgRNA
ccagcacgaggaggagcagc

SEQ ID NO: 929 - RNA, 20 nt, synthetic construct
  source 1..20: mol_type = other RNA
  ncRNA 1..20: ncRNA_class = sgRNA
ggcggcggcggcgctgctcc

SEQ ID NO: 930 - RNA, 20 nt, synthetic construct
  source 1..20: mol_type = other RNA
  ncRNA 1..20: ncRNA_class = sgRNA
cctcgtgctggcggcggcgg

SEQ ID NO: 931 - RNA, 20 nt, synthetic construct
  source 1..20: mol_type = other RNA
  ncRNA 1..20: ncRNA_class = sgRNA
ctcgatggtgaatgacagtg

SEQ ID NO: 932 - RNA, 20 nt, synthetic construct
  source 1..20: mol_type = other RNA
  ncRNA 1..20: ncRNA_class = sgRNA
taaaagggcgatctaatgaa

SEQ ID NO: 933 - RNA, 20 nt, synthetic construct
  source 1..20: mol_type = other RNA
  ncRNA 1..20: ncRNA_class = sgRNA
ataaaagggcgatctaatga

SEQ ID NO: 934 - RNA, 20 nt, synthetic construct
  source 1..20: mol_type = other RNA
  ncRNA 1..20: ncRNA_class = sgRNA
atttatgatatgacaacgtc

SEQ ID NO: 935 - RNA, 20 nt, synthetic construct
  source 1..20: mol_type = other RNA
  ncRNA 1..20: ncRNA_class = sgRNA
aaggtcgatttggagaagtt

SEQ ID NO: 936 - RNA, 20 nt, synthetic construct
  source 1..20: mol_type = other RNA
  ncRNA 1..20: ncRNA_class = sgRNA
ccacgaacgttcttctctag

SEQ ID NO: 937 - RNA, 20 nt, synthetic construct
  source 1..20: mol_type = other RNA
  ncRNA 1..20: ncRNA_class = sgRNA
cctctagagaagaacgttcg

SEQ ID NO: 938 - RNA, 20 nt, synthetic construct
  source 1..20: mol_type = other RNA
  ncRNA 1..20: ncRNA_class = sgRNA
agaacgttcgtggttccgtg

SEQ ID NO: 939 - RNA, 20 nt, synthetic construct
  source 1..20: mol_type = other RNA
  ncRNA 1..20: ncRNA_class = sgRNA
tgtctgctgctataaatccc

SEQ ID NO: 940 - RNA, 20 nt, synthetic construct
  source 1..20: mol_type = other RNA
  ncRNA 1..20: ncRNA_class = sgRNA
tacttggactcagctctggt

SEQ ID NO: 941 - RNA, 20 nt, synthetic construct
  source 1..20: mol_type = other RNA
  ncRNA 1..20: ncRNA_class = sgRNA
gtgtcagattatcatgagca

SEQ ID NO: 942 - RNA, 20 nt, synthetic construct
  source 1..20: mol_type = other RNA
  ncRNA 1..20: ncRNA_class = sgRNA
cttgctctgtccacggcgag

SEQ ID NO: 943 - RNA, 20 nt, synthetic construct
  source 1..20: mol_type = other RNA
  ncRNA 1..20: ncRNA_class = sgRNA
ctgtattgcagacttaggac

SEQ ID NO: 944 - RNA, 20 nt, synthetic construct
  source 1..20: mol_type = other RNA
  ncRNA 1..20: ncRNA_class = sgRNA
tattgctccaaaccacagag

SEQ ID NO: 945 - RNA, 20 nt, synthetic construct
  source 1..20: mol_type = other RNA
  ncRNA 1..20: ncRNA_class = sgRNA
attgctccaaaccacagagt

SEQ ID NO: 946 - RNA, 20 nt, synthetic construct
  source 1..20: mol_type = other RNA
  ncRNA 1..20: ncRNA_class = sgRNA
ggaatcatcgagaacttcag

SEQ ID NO: 947 - RNA, 20 nt, synthetic construct
  source 1..20: mol_type = other RNA
  ncRNA 1..20: ncRNA_class = sgRNA
acgtgctgacatctatgcaa

SEQ ID NO: 948 - RNA, 20 nt, synthetic construct
  source 1..20: mol_type = other RNA
  ncRNA 1..20: ncRNA_class = sgRNA
attgctcgacgatgttccat

SEQ ID NO: 949 - RNA, 20 nt, synthetic construct
  source 1..20: mol_type = other RNA
  ncRNA 1..20: ncRNA_class = sgRNA
gctcgacgatgttccattgg

SEQ ID NO: 950 - RNA, 20 nt, synthetic construct
  source 1..20: mol_type = other RNA
  ncRNA 1..20: ncRNA_class = sgRNA
ggtatgccaatggagcagct

SEQ ID NO: 951 - RNA, 20 nt, synthetic construct
  source 1..20: mol_type = other RNA
  ncRNA 1..20: ncRNA_class = sgRNA
cagctaggcttacagcattg

SEQ ID NO: 952 - RNA, 20 nt, synthetic construct
  source 1..20: mol_type = other RNA
  ncRNA 1..20: ncRNA_class = sgRNA
cgtgctgacatctatgcaat

SEQ ID NO: 953 - RNA, 20 nt, synthetic construct
  source 1..20: mol_type = other RNA
  ncRNA 1..20: ncRNA_class = sgRNA
gataaaacttgctctgtcca

SEQ ID NO: 954 - RNA, 20 nt, synthetic construct
  source 1..20: mol_type = other RNA
  ncRNA 1..20: ncRNA_class = sgRNA
cctcttcatttggcactcga

SEQ ID NO: 955 - RNA, 20 nt, synthetic construct
  source 1..20: mol_type = other RNA
  ncRNA 1..20: ncRNA_class = sgRNA
gtggtttggagcaatatcaa

SEQ ID NO: 956 - RNA, 20 nt, synthetic construct
  source 1..20: mol_type = other RNA
  ncRNA 1..20: ncRNA_class = sgRNA
ccatcgagtgccaaatgaag

SEQ ID NO: 957 - RNA, 20 nt, synthetic construct
  source 1..20: mol_type = other RNA
  ncRNA 1..20: ncRNA_class = sgRNA
atgggcaagaccgctcgccg

SEQ ID NO: 958 - RNA, 20 nt, synthetic construct
  source 1..20: mol_type = other RNA
  ncRNA 1..20: ncRNA_class = sgRNA
agatacacagttactgtgga

SEQ ID NO: 959 - RNA, 20 nt, synthetic construct
  source 1..20: mol_type = other RNA
  ncRNA 1..20: ncRNA_class = sgRNA
atggagattgttggtaccca

SEQ ID NO: 960 - RNA, 20 nt, synthetic construct
  source 1..20: mol_type = other RNA
  ncRNA 1..20: ncRNA_class = sgRNA
ttgtttgtgaacagaagtta

SEQ ID NO: 961 - RNA, 20 nt, synthetic construct
  source 1..20: mol_type = other RNA
  ncRNA 1..20: ncRNA_class = sgRNA
agcaatatcaatggtatctg

SEQ ID NO: 962 - RNA, 20 nt, synthetic construct
  source 1..20: mol_type = other RNA
  ncRNA 1..20: ncRNA_class = sgRNA
ggtgaatgacagtgcggttg

SEQ ID NO: 963 - RNA, 20 nt, synthetic construct
  source 1..20: mol_type = other RNA
  ncRNA 1..20: ncRNA_class = sgRNA
acttgctgtattgcagactt

SEQ ID NO: 964 - RNA, 20 nt, synthetic construct
  source 1..20: mol_type = other RNA
  ncRNA 1..20: ncRNA_class = sgRNA
cgatttggagaagtttggag

SEQ ID NO: 965 - RNA, 20 nt, synthetic construct
  source 1..20: mol_type = other RNA
  ncRNA 1..20: ncRNA_class = sgRNA
attgtgttacaagaaagcat

SEQ ID NO: 966 - RNA, 20 nt, synthetic construct
  source 1..20: mol_type = other RNA
  ncRNA 1..20: ncRNA_class = sgRNA
cggtcttgcccatcttcaca

SEQ ID NO: 967 - RNA, 20 nt, synthetic construct
  source 1..20: mol_type = other RNA
  ncRNA 1..20: ncRNA_class = sgRNA
ttacgtcatgaaaacatcct

SEQ ID NO: 968 - RNA, 20 nt, synthetic construct
  source 1..20: mol_type = other RNA
  ncRNA 1..20: ncRNA_class = sgRNA
aaatctctatgagcaatggc

SEQ ID NO: 969 - RNA, 20 nt, synthetic construct
  source 1..20: mol_type = other RNA
  ncRNA 1..20: ncRNA_class = sgRNA
agagaatgttggtatgccaa

SEQ ID NO: 970 - RNA, 20 nt, synthetic construct
  source 1..20: mol_type = other RNA
  ncRNA 1..20: ncRNA_class = sgRNA
agatcgcccttttatttcag

SEQ ID NO: 971 - RNA, 20 nt, synthetic construct
  source 1..20: mol_type = other RNA
  ncRNA 1..20: ncRNA_class = sgRNA
ggccaaatatcccaaacaga

SEQ ID NO: 972 - RNA, 20 nt, synthetic construct
  source 1..20: mol_type = other RNA
  ncRNA 1..20: ncRNA_class = sgRNA
aagtttggagaggaaagtgg

SEQ ID NO: 973 - RNA, 20 nt, synthetic construct
  source 1..20: mol_type = other RNA
  ncRNA 1..20: ncRNA_class = sgRNA
caagatcataataaggcagt

SEQ ID NO: 974 - RNA, 20 nt, synthetic construct
  source 1..20: mol_type = other RNA
  ncRNA 1..20: ncRNA_class = sgRNA
accacagagtgggaacaaaa

SEQ ID NO: 975 - RNA, 20 nt, synthetic construct
  source 1..20: mol_type = other RNA
  ncRNA 1..20: ncRNA_class = sgRNA
catcttcacatggagattgt

SEQ ID NO: 976 - RNA, 20 nt, synthetic construct
  source 1..20: mol_type = other RNA
  ncRNA 1..20: ncRNA_class = sgRNA
tggaatcatcgagaacttca

SEQ ID NO: 977 - RNA, 20 nt, synthetic construct
  source 1..20: mol_type = other RNA
  ncRNA 1..20: ncRNA_class = sgRNA
gttacgtcatgaaaacatcc

SEQ ID NO: 978 - RNA, 20 nt, synthetic construct
  source 1..20: mol_type = other RNA
  ncRNA 1..20: ncRNA_class = sgRNA
tttcaaatctctatgagcaa

SEQ ID NO: 979 - RNA, 20 nt, synthetic construct
  source 1..20: mol_type = other RNA
  ncRNA 1..20: ncRNA_class = sgRNA
ctaaaattatgagagaatgt

SEQ ID NO: 980 - RNA, 20 nt, synthetic construct
  source 1..20: mol_type = other RNA
  ncRNA 1..20: ncRNA_class = sgRNA
attgttctctgaacaagcaa

SEQ ID NO: 981 - RNA, 20 nt, synthetic construct
  source 1..20: mol_type = other RNA
  ncRNA 1..20: ncRNA_class = sgRNA
aaacagatacacagttactg

SEQ ID NO: 982 - RNA, 20 nt, synthetic construct
  source 1..20: mol_type = other RNA
  ncRNA 1..20: ncRNA_class = sgRNA
agtttggagaggaaagtggc

SEQ ID NO: 983 - RNA, 20 nt, synthetic construct
  source 1..20: mol_type = other RNA
  ncRNA 1..20: ncRNA_class = sgRNA
cacagctctgccatctgttt

SEQ ID NO: 984 - RNA, 20 nt, synthetic construct
  source 1..20: mol_type = other RNA
  ncRNA 1..20: ncRNA_class = sgRNA
atagatgtcagcacgtttga

SEQ ID NO: 985 - RNA, 20 nt, synthetic construct
  source 1..20: mol_type = other RNA
  ncRNA 1..20: ncRNA_class = sgRNA
gtttggagaggaaagtggcg

SEQ ID NO: 986 - RNA, 20 nt, synthetic construct
  source 1..20: mol_type = other RNA
  ncRNA 1..20: ncRNA_class = sgRNA
tcttcaactgatgggtcaga

SEQ ID NO: 987 - RNA, 20 nt, synthetic construct
  source 1..20: mol_type = other RNA
  ncRNA 1..20: ncRNA_class = sgRNA
aatgaagggtcctcttcatt

SEQ ID NO: 988 - RNA, 20 nt, synthetic construct
  source 1..20: mol_type = other RNA
  ncRNA 1..20: ncRNA_class = sgRNA
tagtaccctctgaaataaaa

SEQ ID NO: 989 - RNA, 20 nt, synthetic construct
  source 1..20: mol_type = other RNA
  ncRNA 1..20: ncRNA_class = sgRNA
gatcgcccttttatttcaga

SEQ ID NO: 990 - RNA, 20 nt, synthetic construct
  source 1..20: mol_type = other RNA
  ncRNA 1..20: ncRNA_class = sgRNA
gaaggtacaagatcataata

SEQ ID NO: 991 - RNA, 20 nt, synthetic construct
  source 1..20: mol_type = other RNA
  ncRNA 1..20: ncRNA_class = sgRNA
tttatagcagcagacaataa

SEQ ID NO: 992 - RNA, 20 nt, synthetic construct
  source 1..20: mol_type = other RNA
  ncRNA 1..20: ncRNA_class = sgRNA
tttgataaatctctgcctca

SEQ ID NO: 993 - RNA, 20 nt, synthetic construct
  source 1..20: mol_type = other RNA
  ncRNA 1..20: ncRNA_class = sgRNA
tgcaatgggcttagtattct

SEQ ID NO: 994 - RNA, 20 nt, synthetic construct
  source 1..20: mol_type = other RNA
  ncRNA 1..20: ncRNA_class = sgRNA
aattttagccattactctca

SEQ ID NO: 995 - RNA, 20 nt, synthetic construct
  source 1..20: mol_type = other RNA
  ncRNA 1..20: ncRNA_class = sgRNA
gtagtaccctctgaaataaa

SEQ ID NO: 996 - RNA, 20 nt, synthetic construct
  source 1..20: mol_type = other RNA
  ncRNA 1..20: ncRNA_class = sgRNA
tcacagctctgccatctgtt

SEQ ID NO: 997 - RNA, 20 nt, synthetic construct
  source 1..20: mol_type = other RNA
  ncRNA 1..20: ncRNA_class = sgRNA
tctgtttaagtaatcaaaaa

SEQ ID NO: 998 - RNA, 20 nt, synthetic construct
  source 1..20: mol_type = other RNA
  ncRNA 1..20: ncRNA_class = sgRNA
ttacaagaaagcattggcaa

SEQ ID NO: 999 - RNA, 20 nt, synthetic construct
  source 1..20: mol_type = other RNA
  ncRNA 1..20: ncRNA_class = sgRNA
atggaatcatcgagaacttc

SEQ ID NO: 1000 - RNA, 20 nt, synthetic construct
  source 1..20: mol_type = other RNA
  ncRNA 1..20: ncRNA_class = sgRNA
tttgttcccactctgtggtt

SEQ ID NO: 1001 - RNA, 20 nt, synthetic construct
  source 1..20: mol_type = other RNA
  ncRNA 1..20: ncRNA_class = sgRNA
agcattggcaaaggtcgatt

SEQ ID NO: 1002 - RNA, 20 nt, synthetic construct
  source 1..20: mol_type = other RNA
  ncRNA 1..20: ncRNA_class = sgRNA
gatatgacaacgtcaggttc

SEQ ID NO: 1003 - RNA, 20 nt, synthetic construct
  source 1..20: mol_type = other RNA
  ncRNA 1..20: ncRNA_class = sgRNA
atgcaatgggcttagtattc

SEQ ID NO: 1004 - RNA, 20 nt, synthetic construct
  source 1..20: mol_type = other RNA
  ncRNA 1..20: ncRNA_class = sgRNA
tgccatctgtttgggatatt

SEQ ID NO: 1005 - RNA, 20 nt, synthetic construct
  source 1..20: mol_type = other RNA
  ncRNA 1..20: ncRNA_class = sgRNA
caacaatctccatgtgaaga

SEQ ID NO: 1006 - RNA, 20 nt, synthetic construct
  source 1..20: mol_type = other RNA
  ncRNA 1..20: ncRNA_class = sgRNA
ttctcatttcttcaactgat

SEQ ID NO: 1007 - RNA, 20 nt, synthetic construct
  source 1..20: mol_type = other RNA
  ncRNA 1..20: ncRNA_class = sgRNA
acaacgtcaggttctggctc

SEQ ID NO: 1008 - RNA, 20 nt, synthetic construct
  source 1..20: mol_type = other RNA
  ncRNA 1..20: ncRNA_class = sgRNA
tgtaagcctagctgctccat

SEQ ID NO: 1009 - RNA, 20 nt, synthetic construct
  source 1..20: mol_type = other RNA
  ncRNA 1..20: ncRNA_class = sgRNA
aatatcttggtaaagaagaa

SEQ ID NO: 1010 - RNA, 20 nt, synthetic construct
  source 1..20: mol_type = other RNA
  ncRNA 1..20: ncRNA_class = sgRNA
tttctcatttcttcaactga

SEQ ID NO: 1011 - RNA, 20 nt, synthetic construct
  source 1..20: mol_type = other RNA
  ncRNA 1..20: ncRNA_class = sgRNA
ctgccagttccacaggacca

SEQ ID NO: 1012 - RNA, 20 nt, synthetic construct
  source 1..20: mol_type = other RNA
  ncRNA 1..20: ncRNA_class = sgRNA
atgacagctgccagttccac

SEQ ID NO: 1013 - RNA, 20 nt, synthetic construct
  source 1..20: mol_type = other RNA
  ncRNA 1..20: ncRNA_class = sgRNA
atcacctggccttggtcctg

SEQ ID NO: 1014 - RNA, 20 nt, synthetic construct
  source 1..20: mol_type = other RNA
  ncRNA 1..20: ncRNA_class = sgRNA
tggccttggtcctgtggaac

SEQ ID NO: 1015 - RNA, 20 nt, synthetic construct
  source 1..20: mol_type = other RNA
  ncRNA 1..20: ncRNA_class = sgRNA
gaactggcagctgtcattgc

SEQ ID NO: 1016 - RNA, 20 nt, synthetic construct
  source 1..20: mol_type = other RNA
  ncRNA 1..20: ncRNA_class = sgRNA
agttccacaggaccaaggcc

SEQ ID NO: 1017 - RNA, 20 nt, synthetic construct
  source 1..20: mol_type = other RNA
  ncRNA 1..20: ncRNA_class = sgRNA
gtaaagtcatcacctggcct

SEQ ID NO: 1018 - RNA, 20 nt, synthetic construct
  source 1..20: mol_type = other RNA
  ncRNA 1..20: ncRNA_class = sgRNA
aaaatagaacttccaactac

SEQ ID NO: 1019 - RNA, 20 nt, synthetic construct
  source 1..20: mol_type = other RNA
  ncRNA 1..20: ncRNA_class = sgRNA
gagatgcagacgaagcacac

SEQ ID NO: 1020 - RNA, 20 nt, synthetic construct
  source 1..20: mol_type = other RNA
  ncRNA 1..20: ncRNA_class = sgRNA
ctgcatctcactcatgttga

SEQ ID NO: 1021 - RNA, 20 nt, synthetic construct
  source 1..20: mol_type = other RNA
  ncRNA 1..20: ncRNA_class = sgRNA
tcgcaactcagtcaacagga

SEQ ID NO: 1022 - RNA, 20 nt, synthetic construct
  source 1..20: mol_type = other RNA
  ncRNA 1..20: ncRNA_class = sgRNA
attatcgcaactcagtcaac

SEQ ID NO: 1023 - RNA, 20 nt, synthetic construct
  source 1..20: mol_type = other RNA
  ncRNA 1..20: ncRNA_class = sgRNA
aacgtgcggtgggatcgtgc

SEQ ID NO: 1024 - RNA, 20 nt, synthetic construct
  source 1..20: mol_type = other RNA
  ncRNA 1..20: ncRNA_class = sgRNA
ccgacttctgaacgtgcggt

SEQ ID NO: 1025 - RNA, 20 nt, synthetic construct
  source 1..20: mol_type = other RNA
  ncRNA 1..20: ncRNA_class = sgRNA
cccgacttctgaacgtgcgg

SEQ ID NO: 1026 - RNA, 20 nt, synthetic construct
  source 1..20: mol_type = other RNA
  ncRNA 1..20: ncRNA_class = sgRNA
atgatagtcactgacaacaa

SEQ ID NO: 1027 - RNA, 20 nt, synthetic construct
  source 1..20: mol_type = other RNA
  ncRNA 1..20: ncRNA_class = sgRNA
ctgtggcttctcacagatgg

SEQ ID NO: 1028 - RNA, 20 nt, synthetic construct
  source 1..20: mol_type = other RNA
  ncRNA 1..20: ncRNA_class = sgRNA
ttccagaataaagtcatggt

SEQ ID NO: 1029 - RNA, 20 nt, synthetic construct
  source 1..20: mol_type = other RNA
  ncRNA 1..20: ncRNA_class = sgRNA
gaagccacaggaagtctgtg

SEQ ID NO: 1030 - RNA, 20 nt, synthetic construct
  source 1..20: mol_type = other RNA
  ncRNA 1..20: ncRNA_class = sgRNA
acagccacacagacttcctg

SEQ ID NO: 1031 - RNA, 20 nt, synthetic construct
  source 1..20: mol_type = other RNA
  ncRNA 1..20: ncRNA_class = sgRNA
ccagaataaagtcatggtag

SEQ ID NO: 1032 - RNA, 20 nt, synthetic construct
  source 1..20: mol_type = other RNA
  ncRNA 1..20: ncRNA_class = sgRNA
aggaagtctgtgtggctgta

SEQ ID NO: 1033 - RNA, 20 nt, synthetic construct
  source 1..20: mol_type = other RNA
  ncRNA 1..20: ncRNA_class = sgRNA
ccaccgcacgttcagaagtc

SEQ ID NO: 1034 - RNA, 20 nt, synthetic construct
  source 1..20: mol_type = other RNA
  ncRNA 1..20: ncRNA_class = sgRNA
tgctggcgatacgcgtccac

SEQ ID NO: 1035 - RNA, 20 nt, synthetic construct
  source 1..20: mol_type = other RNA
  ncRNA 1..20: ncRNA_class = sgRNA
ggacgatgtgcagcggccac

SEQ ID NO: 1036 - RNA, 20 nt, synthetic construct
  source 1..20: mol_type = other RNA
  ncRNA 1..20: ncRNA_class = sgRNA
ctccatctgtgagaagccac

SEQ ID NO: 1037 - RNA, 20 nt, synthetic construct
  source 1..20: mol_type = other RNA
  ncRNA 1..20: ncRNA_class = sgRNA
cacatgaagaaagtctcacc

SEQ ID NO: 1038 - RNA, 20 nt, synthetic construct
  source 1..20: mol_type = other RNA
  ncRNA 1..20: ncRNA_class = sgRNA
catcttccagaataaagtca

SEQ ID NO: 1039 - RNA, 20 nt, synthetic construct
  source 1..20: mol_type = other RNA
  ncRNA 1..20: ncRNA_class = sgRNA
ttcctgtggcttctcacaga

SEQ ID NO: 1040 - RNA, 20 nt, synthetic construct
  source 1..20: mol_type = other RNA
  ncRNA 1..20: ncRNA_class = sgRNA
attgcactcatcagagctac

SEQ ID NO: 1041 - RNA, 20 nt, synthetic construct
  source 1..20: mol_type = other RNA
  ncRNA 1..20: ncRNA_class = sgRNA
gcaggatttctggttgtcac

SEQ ID NO: 1042 - RNA, 20 nt, synthetic construct
  source 1..20: mol_type = other RNA
  ncRNA 1..20: ncRNA_class = sgRNA
tccagaataaagtcatggta

SEQ ID NO: 1043 - RNA, 20 nt, synthetic construct
  source 1..20: mol_type = other RNA
  ncRNA 1..20: ncRNA_class = sgRNA
agtcatggtaggggagcttg

SEQ ID NO: 1044 - RNA, 20 nt, synthetic construct
  source 1..20: mol_type = other RNA
  ncRNA 1..20: ncRNA_class = sgRNA
ttctccaaagtgcattatga

SEQ ID NO: 1045 - RNA, 20 nt, synthetic construct
  source 1..20: mol_type = other RNA
  ncRNA 1..20: ncRNA_class = sgRNA
gacaacatcatcttctcaga

SEQ ID NO: 1046 - RNA, 20 nt, synthetic construct
  source 1..20: mol_type = other RNA
  ncRNA 1..20: ncRNA_class = sgRNA
ggccgctgcacatcgtcctg

SEQ ID NO: 1047 - RNA, 20 nt, synthetic construct
  source 1..20: mol_type = other RNA
  ncRNA 1..20: ncRNA_class = sgRNA
cccaccgcacgttcagaagt

SEQ ID NO: 1048 - RNA, 20 nt, synthetic construct
  source 1..20: mol_type = other RNA
  ncRNA 1..20: ncRNA_class = sgRNA
tcacaaaatttacacagttg

SEQ ID NO: 1049 - RNA, 20 nt, synthetic construct
  source 1..20: mol_type = other RNA
  ncRNA 1..20: ncRNA_class = sgRNA
ggtaggggagcttggggtca

SEQ ID NO: 1050 - RNA, 20 nt, synthetic construct
  source 1..20: mol_type = other RNA
  ncRNA 1..20: ncRNA_class = sgRNA
ggatttctggttgtcacagg

SEQ ID NO: 1051 - RNA, 20 nt, synthetic construct
  source 1..20: mol_type = other RNA
  ncRNA 1..20: ncRNA_class = sgRNA
aagtcatggtaggggagctt

SEQ ID NO: 1052 - RNA, 20 nt, synthetic construct
  source 1..20: mol_type = other RNA
  ncRNA 1..20: ncRNA_class = sgRNA
agttgctcatgcaggatttc

SEQ ID NO: 1053 - RNA, 20 nt, synthetic construct
  source 1..20: mol_type = other RNA
  ncRNA 1..20: ncRNA_class = sgRNA
aaagtcatggtaggggagct

SEQ ID NO: 1054 - RNA, 20 nt, synthetic construct
  source 1..20: mol_type = other RNA
  ncRNA 1..20: ncRNA_class = sgRNA
gtccacaggacgatgtgcag

SEQ ID NO: 1055 - RNA, 20 nt, synthetic construct
  source 1..20: mol_type = other RNA
  ncRNA 1..20: ncRNA_class = sgRNA
ttttccttcataatgcactt

SEQ ID NO: 1056 - RNA, 20 nt, synthetic construct
  source 1..20: mol_type = other RNA
  ncRNA 1..20: ncRNA_class = sgRNA
cccctaccatgactttattc

SEQ ID NO: 1057 - RNA, 20 nt, synthetic construct
  source 1..20: mol_type = other RNA
  ncRNA 1..20: ncRNA_class = sgRNA
gcttctgctgccggttaacg

SEQ ID NO: 1058 - RNA, 20 nt, synthetic construct
  source 1..20: mol_type = other RNA
  ncRNA 1..20: ncRNA_class = sgRNA
tctactgctaccgcgttaac

SEQ ID NO: 1059 - RNA, 20 nt, synthetic construct
  source 1..20: mol_type = other RNA
  ncRNA 1..20: ncRNA_class = sgRNA
gcagaagctgagttcaacct

SEQ ID NO: 1060 - RNA, 20 nt, synthetic construct
  source 1..20: mol_type = other RNA
  ncRNA 1..20: ncRNA_class = sgRNA
cctgggaaaccggcaagacg

SEQ ID NO: 1061 - RNA, 20 nt, synthetic construct
  source 1..20: mol_type = other RNA
  ncRNA 1..20: ncRNA_class = sgRNA
cggcaagacgcggaagctca

SEQ ID NO: 1062 - RNA, 20 nt, synthetic construct
  source 1..20: mol_type = other RNA
  ncRNA 1..20: ncRNA_class = sgRNA
gcggtcatcttccaggatga

SEQ ID NO: 1063 - RNA, 20 nt, synthetic construct
  source 1..20: mol_type = other RNA
  ncRNA 1..20: ncRNA_class = sgRNA
gttgatgttgttggcacacg

SEQ ID NO: 1064 - RNA, 20 nt, synthetic construct
  source 1..20: mol_type = other RNA
  ncRNA 1..20: ncRNA_class = sgRNA
attgagctggacaccctggt

SEQ ID NO: 1065 - RNA, 20 nt, synthetic construct
  source 1..20: mol_type = other RNA
  ncRNA 1..20: ncRNA_class = sgRNA
aaagcgacctttccccacca

SEQ ID NO: 1066 - RNA, 20 nt, synthetic construct
  source 1..20: mol_type = other RNA
  ncRNA 1..20: ncRNA_class = sgRNA
ttcagagcagtttgagacag

SEQ ID NO: 1067 - RNA, 20 nt, synthetic construct
  source 1..20: mol_type = other RNA
  ncRNA 1..20: ncRNA_class = sgRNA
agtcaagatctttccctatg

SEQ ID NO: 1068 - RNA, 20 nt, synthetic construct
  source 1..20: mol_type = other RNA
  ncRNA 1..20: ncRNA_class = sgRNA
taggttgcccttggcgtgga

SEQ ID NO: 1069 - RNA, 20 nt, synthetic construct
  source 1..20: mol_type = other RNA
  ncRNA 1..20: ncRNA_class = sgRNA
atcaccgccttccacgccaa

SEQ ID NO: 1070 - RNA, 20 nt, synthetic construct
  source 1..20: mol_type = other RNA
  ncRNA 1..20: ncRNA_class = sgRNA
acctacaggagtacctgacg

SEQ ID NO: 1071 - RNA, 20 nt, synthetic construct
  source 1..20: mol_type = other RNA
  ncRNA 1..20: ncRNA_class = sgRNA
agctgatgacatgccgcgtc

SEQ ID NO: 1072 - RNA, 20 nt, synthetic construct
  source 1..20: mol_type = other RNA
  ncRNA 1..20: ncRNA_class = sgRNA
gacgcggcatgtcatcagct

SEQ ID NO: 1073 - RNA, 20 nt, synthetic construct
  source 1..20: mol_type = other RNA
  ncRNA 1..20: ncRNA_class = sgRNA
gcggcatgtcatcagctggg

SEQ ID NO: 1074 - RNA, 20 nt, synthetic construct
  source 1..20: mol_type = other RNA
  ncRNA 1..20: ncRNA_class = sgRNA
tgggcagctccctcgcccgg

SEQ ID NO: 1075 - RNA, 20 nt, synthetic construct
  source 1..20: mol_type = other RNA
  ncRNA 1..20: ncRNA_class = sgRNA
gtggaggtgagcaatccccc

SEQ ID NO: 1076 - RNA, 20 nt, synthetic construct
  source 1..20: mol_type = other RNA
  ncRNA 1..20: ncRNA_class = sgRNA
tgtggaggtgagcaatcccc

SEQ ID NO: 1077 - RNA, 20 nt, synthetic construct
  source 1..20: mol_type = other RNA
  ncRNA 1..20: ncRNA_class = sgRNA
atggagtgtgatcactgtgg

SEQ ID NO: 1078 - RNA, 20 nt, synthetic construct
  source 1..20: mol_type = other RNA
  ncRNA 1..20: ncRNA_class = sgRNA
cacatggagtgtgatcactg

SEQ ID NO: 1079 - RNA, 20 nt, synthetic construct
  source 1..20: mol_type = other RNA
  ncRNA 1..20: ncRNA_class = sgRNA
acagtgatcacactccatgt

SEQ ID NO: 1080 - RNA, 20 nt, synthetic construct
  source 1..20: mol_type = other RNA
  ncRNA 1..20: ncRNA_class = sgRNA
gtgatcacactccatgtggg

SEQ ID NO: 1081 - RNA, 20 nt, synthetic construct
  source 1..20: mol_type = other RNA
  ncRNA 1..20: ncRNA_class = sgRNA
gggaaagcccaaagtcacac

SEQ ID NO: 1082 - RNA, 20 nt, synthetic construct
  source 1..20: mol_type = other RNA
  ncRNA 1..20: ncRNA_class = sgRNA
cagagtagggtccagacgca

SEQ ID NO: 1083 - RNA, 20 nt, synthetic construct
  source 1..20: mol_type = other RNA
  ncRNA 1..20: ncRNA_class = sgRNA
tctggaccctactctgtctg

SEQ ID NO: 1084 - RNA, 20 nt, synthetic construct
  source 1..20: mol_type = other RNA
  ncRNA 1..20: ncRNA_class = sgRNA
gtggatgacctggctaacag

SEQ ID NO: 1085 - RNA, 20 nt, synthetic construct
  source 1..20: mol_type = other RNA
  ncRNA 1..20: ncRNA_class = sgRNA
tggatgacctggctaacagt

SEQ ID NO: 1086 - RNA, 20 nt, synthetic construct
  source 1..20: mol_type = other RNA
  ncRNA 1..20: ncRNA_class = sgRNA
ggtgggaactgcaagataca

SEQ ID NO: 1087 - RNA, 20 nt, synthetic construct
  source 1..20: mol_type = other RNA
  ncRNA 1..20: ncRNA_class = sgRNA
cagagccatggagtagacat

SEQ ID NO: 1088 - RNA, 20 nt, synthetic construct
  source 1..20: mol_type = other RNA
  ncRNA 1..20: ncRNA_class = sgRNA
gcagaccgatgtctactcca

SEQ ID NO: 1089 - RNA, 20 nt, synthetic construct
  source 1..20: mol_type = other RNA
  ncRNA 1..20: ncRNA_class = sgRNA
acatctcgctgtaatgcagt

SEQ ID NO: 1090 - RNA, 20 nt, synthetic construct
  source 1..20: mol_type = other RNA
  ncRNA 1..20: ncRNA_class = sgRNA
cgcaccttggaaccaaatgg

SEQ ID NO: 1091 - RNA, 20 nt, synthetic construct
  source 1..20: mol_type = other RNA
  ncRNA 1..20: ncRNA_class = sgRNA
ccttcatgctttcgacacag

SEQ ID NO: 1092 - RNA, 20 nt, synthetic construct
  source 1..20: mol_type = other RNA
  ncRNA 1..20: ncRNA_class = sgRNA
gtccttcatgctttcgacac

SEQ ID NO: 1093 - RNA, 20 nt, synthetic construct
  source 1..20: mol_type = other RNA
  ncRNA 1..20: ncRNA_class = sgRNA
cccctgtgtcgaaagcatga

SEQ ID NO: 1094 - RNA, 20 nt, synthetic construct
  source 1..20: mol_type = other RNA
  ncRNA 1..20: ncRNA_class = sgRNA
acaacgtgttgagagatcga

SEQ ID NO: 1095 - RNA, 20 nt, synthetic construct
  source 1..20: mol_type = other RNA
  ncRNA 1..20: ncRNA_class = sgRNA
gtgagacgttgactgagtgc

SEQ ID NO: 1096 - RNA, 20 nt, synthetic construct
  source 1..20: mol_type = other RNA
  ncRNA 1..20: ncRNA_class = sgRNA
tgagacgttgactgagtgct

SEQ ID NO: 1097 - RNA, 20 nt, synthetic construct
  source 1..20: mol_type = other RNA
  ncRNA 1..20: ncRNA_class = sgRNA
gtgctgggaccacgacccag

SEQ ID NO: 1098 - RNA, 20 nt, synthetic construct
  source 1..20: mol_type = other RNA
  ncRNA 1..20: ncRNA_class = sgRNA
ccgtctcacagcccagtgtg

SEQ ID NO: 1099 - RNA, 20 nt, synthetic construct
  source 1..20: mol_type = other RNA
  ncRNA 1..20: ncRNA_class = sgRNA
gaagcgttctgccacacact

SEQ ID NO: 1100 - RNA, 20 nt, synthetic construct
  source 1..20: mol_type = other RNA
  ncRNA 1..20: ncRNA_class = sgRNA
aggagcggaagacggagttg

SEQ ID NO: 1101 - RNA, 20 nt, synthetic construct
  source 1..20: mol_type = other RNA
  ncRNA 1..20: ncRNA_class = sgRNA
gaggagcggaagacggagtt

SEQ ID NO: 1102 - RNA, 20 nt, synthetic construct
  source 1..20: mol_type = other RNA
  ncRNA 1..20: ncRNA_class = sgRNA
tggtggttgagccagaagct

SEQ ID NO: 1103 - RNA, 20 nt, synthetic construct
  source 1..20: mol_type = other RNA
  ncRNA 1..20: ncRNA_class = sgRNA
tgaagcgttctgccacacac

SEQ ID NO: 1104 - RNA, 20 nt, synthetic construct
  source 1..20: mol_type = other RNA
  ncRNA 1..20: ncRNA_class = sgRNA
caagatgcccatcgtgcaca

SEQ ID NO: 1105 - RNA, 20 nt, synthetic construct
  source 1..20: mol_type = other RNA
  ncRNA 1..20: ncRNA_class = sgRNA
ctccagaagtcctagaatcc

SEQ ID NO: 1106 - RNA, 20 nt, synthetic construct
  source 1..20: mol_type = other RNA
  ncRNA 1..20: ncRNA_class = sgRNA
gacaacgtgttgagagatcg

SEQ ID NO: 1107 - RNA, 20 nt, synthetic construct
  source 1..20: mol_type = other RNA
  ncRNA 1..20: ncRNA_class = sgRNA
actccagttcctgacggctg

SEQ ID NO: 1108 - RNA, 20 nt, synthetic construct
  source 1..20: mol_type = other RNA
  ncRNA 1..20: ncRNA_class = sgRNA
tccttcatgctttcgacaca

SEQ ID NO: 1109 - RNA, 20 nt, synthetic construct
  source 1..20: mol_type = other RNA
  ncRNA 1..20: ncRNA_class = sgRNA
cacagtgatcacactccatg

SEQ ID NO: 1110 - RNA, 20 nt, synthetic construct
  source 1..20: mol_type = other RNA
  ncRNA 1..20: ncRNA_class = sgRNA
tccatttggttccaaggtgc

SEQ ID NO: 1111 - RNA, 20 nt, synthetic construct
  source 1..20: mol_type = other RNA
  ncRNA 1..20: ncRNA_class = sgRNA
tgacctggctaacagtgggc

SEQ ID NO: 1112 - RNA, 20 nt, synthetic construct
  source 1..20: mol_type = other RNA
  ncRNA 1..20: ncRNA_class = sgRNA
ggggaaaggtcgctttgctg

SEQ ID NO: 1113 - RNA, 20 nt, synthetic construct
  source 1..20: mol_type = other RNA
  ncRNA 1..20: ncRNA_class = sgRNA
gccgcgtcaggtactcctgt

SEQ ID NO: 1114 - RNA, 20 nt, synthetic construct
  source 1..20: mol_type = other RNA
  ncRNA 1..20: ncRNA_class = sgRNA
ccaagaggcatactcctcat

SEQ ID NO: 1115 - RNA, 20 nt, synthetic construct
  source 1..20: mol_type = other RNA
  ncRNA 1..20: ncRNA_class = sgRNA
cttgaggtccctgtgcacga

SEQ ID NO: 1116 - RNA, 20 nt, synthetic construct
  source 1..20: mol_type = other RNA
  ncRNA 1..20: ncRNA_class = sgRNA
gtgagcaatcccccgggcga

SEQ ID NO: 1117 - RNA, 20 nt, synthetic construct
  source 1..20: mol_type = other RNA
  ncRNA 1..20: ncRNA_class = sgRNA
tgagcctccatttggttcca

SEQ ID NO: 1118 - RNA, 20 nt, synthetic construct
  source 1..20: mol_type = other RNA
  ncRNA 1..20: ncRNA_class = sgRNA
gacatctcgctgtaatgcag

SEQ ID NO: 1119 - RNA, 20 nt, synthetic construct
  source 1..20: mol_type = other RNA
  ncRNA 1..20: ncRNA_class = sgRNA
acgtggagctgatgtcagag

SEQ ID NO: 1120 - RNA, 20 nt, synthetic construct
  source 1..20: mol_type = other RNA
  ncRNA 1..20: ncRNA_class = sgRNA
acaggggtgctcccgcacct

SEQ ID NO: 1121 - RNA, 20 nt, synthetic construct
  source 1..20: mol_type = other RNA
  ncRNA 1..20: ncRNA_class = sgRNA
tgggaggacctgcgcaagct

SEQ ID NO: 1122 - RNA, 20 nt, synthetic construct
  source 1..20: mol_type = other RNA
  ncRNA 1..20: ncRNA_class = sgRNA
tcttccgctcctcagccgtc

SEQ ID NO: 1123 - RNA, 20 nt, synthetic construct
  source 1..20: mol_type = other RNA
  ncRNA 1..20: ncRNA_class = sgRNA
cctatgaggagtatgcctct

SEQ ID NO: 1124 - RNA, 20 nt, synthetic construct
  source 1..20: mol_type = other RNA
  ncRNA 1..20: ncRNA_class = sgRNA
gatcaccgccttccacgcca

SEQ ID NO: 1125 - RNA, 20 nt, synthetic construct
  source 1..20: mol_type = other RNA
  ncRNA 1..20: ncRNA_class = sgRNA
gtactcctgtaggttgccct

SEQ ID NO: 1126 - RNA, 20 nt, synthetic construct
  source 1..20: mol_type = other RNA
  ncRNA 1..20: ncRNA_class = sgRNA
gaacatactccagttcctga

SEQ ID NO: 1127 - RNA, 20 nt, synthetic construct
  source 1..20: mol_type = other RNA
  ncRNA 1..20: ncRNA_class = sgRNA
cggagttggggaaacaatac

SEQ ID NO: 1128 - RNA, 20 nt, synthetic construct
  source 1..20: mol_type = other RNA
  ncRNA 1..20: ncRNA_class = sgRNA
aggttaggtcgttcttcacg

SEQ ID NO: 1129 - RNA, 20 nt, synthetic construct
  source 1..20: mol_type = other RNA
  ncRNA 1..20: ncRNA_class = sgRNA
cctgtaggttgcccttggcg

SEQ ID NO: 1130 - RNA, 20 nt, synthetic construct
  source 1..20: mol_type = other RNA
  ncRNA 1..20: ncRNA_class = sgRNA
ggtgagcaatcccccgggcg

SEQ ID NO: 1131 - RNA, 20 nt, synthetic construct
  source 1..20: mol_type = other RNA
  ncRNA 1..20: ncRNA_class = sgRNA
tcccgcaccttggaaccaaa

SEQ ID NO: 1132 - RNA, 20 nt, synthetic construct
  source 1..20: mol_type = other RNA
  ncRNA 1..20: ncRNA_class = sgRNA
gacggctgaggagcggaaga

SEQ ID NO: 1133 - RNA, 20 nt, synthetic construct
  source 1..20: mol_type = other RNA
  ncRNA 1..20: ncRNA_class = sgRNA
acagagtagggtccagacgc

SEQ ID NO: 1134 - RNA, 20 nt, synthetic construct
  source 1..20: mol_type = other RNA
  ncRNA 1..20: ncRNA_class = sgRNA
ttgagctggacaccctggtg

SEQ ID NO: 1135 - RNA, 20 nt, synthetic construct
  source 1..20: mol_type = other RNA
  ncRNA 1..20: ncRNA_class = sgRNA
ctgggcagctccctcgcccg

SEQ ID NO: 1136 - RNA, 20 nt, synthetic construct
  source 1..20: mol_type = other RNA
  ncRNA 1..20: ncRNA_class = sgRNA
gggctgtgagacgggcctct

SEQ ID NO: 1137 - RNA, 20 nt, synthetic construct
  source 1..20: mol_type = other RNA
  ncRNA 1..20: ncRNA_class = sgRNA
gtcgttcttcacgaggatat

SEQ ID NO: 1138 - RNA, 20 nt, synthetic construct
  source 1..20: mol_type = other RNA
  ncRNA 1..20: ncRNA_class = sgRNA
gttgcccttggcgtggaagg

SEQ ID NO: 1139 - RNA, 20 nt, synthetic construct
  source 1..20: mol_type = other RNA
  ncRNA 1..20: ncRNA_class = sgRNA
ccgcgtcttgccggtttccc

SEQ ID NO: 1140 - RNA, 20 nt, synthetic construct
  source 1..20: mol_type = other RNA
  ncRNA 1..20: ncRNA_class = sgRNA
agcagaagctgagttcaacc

SEQ ID NO: 1141 - RNA, 20 nt, synthetic construct
  source 1..20: mol_type = other RNA
  ncRNA 1..20: ncRNA_class = sgRNA
tgagacgggcctctgggtcg

SEQ ID NO: 1142 - RNA, 20 nt, synthetic construct
  source 1..20: mol_type = other RNA
  ncRNA 1..20: ncRNA_class = sgRNA
ttgaggtccctgtgcacgat

SEQ ID NO: 1143 - RNA, 20 nt, synthetic construct
  source 1..20: mol_type = other RNA
  ncRNA 1..20: ncRNA_class = sgRNA
ctccatttggttccaaggtg

SEQ ID NO: 1144 - RNA, 20 nt, synthetic construct
  source 1..20: mol_type = other RNA
  ncRNA 1..20: ncRNA_class = sgRNA
aaagattatgagcctccatt

SEQ ID NO: 1145 - RNA, 20 nt, synthetic construct
  source 1..20: mol_type = other RNA
  ncRNA 1..20: ncRNA_class = sgRNA
ggtcatccacagacagagta

SEQ ID NO: 1146 - RNA, 20 nt, synthetic construct
  source 1..20: mol_type = other RNA
  ncRNA 1..20: ncRNA_class = sgRNA
ccaagatgcccatcgtgcac

SEQ ID NO: 1147 - RNA, 20 nt, synthetic construct
  source 1..20: mol_type = other RNA
  ncRNA 1..20: ncRNA_class = sgRNA
tgggcagcagctctgtgttg

SEQ ID NO: 1148 - RNA, 20 nt, synthetic construct
  source 1..20: mol_type = other RNA
  ncRNA 1..20: ncRNA_class = sgRNA
cgaggatattggagctcttg

SEQ ID NO: 1149 - RNA, 20 nt, synthetic construct
  source 1..20: mol_type = other RNA
  ncRNA 1..20: ncRNA_class = sgRNA
caaagcgacctttccccacc

SEQ ID NO: 1150 - RNA, 20 nt, synthetic construct
  source 1..20: mol_type = other RNA
  ncRNA 1..20: ncRNA_class = sgRNA
gtagacatcggtctgcttga

SEQ ID NO: 1151 - RNA, 20 nt, synthetic construct
  source 1..20: mol_type = other RNA
  ncRNA 1..20: ncRNA_class = sgRNA
gcccattgagctggacaccc

SEQ ID NO: 1152 - RNA, 20 nt, synthetic construct
  source 1..20: mol_type = other RNA
  ncRNA 1..20: ncRNA_class = sgRNA
aggtcatccacagacagagt

SEQ ID NO: 1153 - RNA, 20 nt, synthetic construct
  source 1..20: mol_type = other RNA
  ncRNA 1..20: ncRNA_class = sgRNA
tactctgtctgtggatgacc

SEQ ID NO: 1154 - RNA, 20 nt, synthetic construct
  source 1..20: mol_type = other RNA
  ncRNA 1..20: ncRNA_class = sgRNA
tcgctttgctgaggtctata

SEQ ID NO: 1155 - RNA, 20 nt, synthetic construct
  source 1..20: mol_type = other RNA
  ncRNA 1..20: ncRNA_class = sgRNA
ggcatcttgggcctcccaca

SEQ ID NO: 1156 - RNA, 20 nt, synthetic construct
  source 1..20: mol_type = other RNA
  ncRNA 1..20: ncRNA_class = sgRNA
cgatgtctactccatggctc

SEQ ID NO: 1157 - RNA, 20 nt, synthetic construct
  source 1..20: mol_type = other RNA
  ncRNA 1..20: ncRNA_class = sgRNA
agtcacacaggcagcaggtt

SEQ ID NO: 1158 - RNA, 20 nt, synthetic construct
  source 1..20: mol_type = other RNA
  ncRNA 1..20: ncRNA_class = sgRNA
cgagcactgtgccatcatcc

SEQ ID NO: 1159 - RNA, 20 nt, synthetic construct
  source 1..20: mol_type = other RNA
  ncRNA 1..20: ncRNA_class = sgRNA
ccacgccaagggcaacctac

SEQ ID NO: 1160 - RNA, 20 nt, synthetic construct
  source 1..20: mol_type = other RNA
  ncRNA 1..20: ncRNA_class = sgRNA
caagaggcatactcctcata

SEQ ID NO: 1161 - RNA, 20 nt, synthetic construct
  source 1..20: mol_type = other RNA
  ncRNA 1..20: ncRNA_class = sgRNA
ctggtggttgagccagaagc

SEQ ID NO: 1162 - RNA, 20 nt, synthetic construct
  source 1..20: mol_type = other RNA
  ncRNA 1..20: ncRNA_class = sgRNA
cacacactgggctgtgagac

SEQ ID NO: 1163 - RNA, 20 nt, synthetic construct
  source 1..20: mol_type = other RNA
  ncRNA 1..20: ncRNA_class = sgRNA
caccagggtgtccagctcaa

SEQ ID NO: 1164 - RNA, 20 nt, synthetic construct
  source 1..20: mol_type = other RNA
  ncRNA 1..20: ncRNA_class = sgRNA
ctccatggctctggtgctct

SEQ ID NO: 1165 - RNA, 20 nt, synthetic construct
  source 1..20: mol_type = other RNA
  ncRNA 1..20: ncRNA_class = sgRNA
tcaacgtctcacacaccatc

SEQ ID NO: 1166 - RNA, 20 nt, synthetic construct
  source 1..20: mol_type = other RNA
  ncRNA 1..20: ncRNA_class = sgRNA
tgacgcggcatgtcatcagc

SEQ ID NO: 1167 - RNA, 20 nt, synthetic construct
  source 1..20: mol_type = other RNA
  ncRNA 1..20: ncRNA_class = sgRNA
cctagaatccaggatgaatt

SEQ ID NO: 1168 - RNA, 20 nt, synthetic construct
  source 1..20: mol_type = other RNA
  ncRNA 1..20: ncRNA_class = sgRNA
gaccagaaattcccagcttc

SEQ ID NO: 1169 - RNA, 20 nt, synthetic construct
  source 1..20: mol_type = other RNA
  ncRNA 1..20: ncRNA_class = sgRNA
ccaaattcatcctggattct

SEQ ID NO: 1170 - RNA, 20 nt, synthetic construct
  source 1..20: mol_type = other RNA
  ncRNA 1..20: ncRNA_class = sgRNA
cattgagctggacaccctgg

SEQ ID NO: 1171 - RNA, 20 nt, synthetic construct
  source 1..20: mol_type = other RNA
  ncRNA 1..20: ncRNA_class = sgRNA
gctcctcagccgtcaggaac

SEQ ID NO: 1172 - RNA, 20 nt, synthetic construct
  source 1..20: mol_type = other RNA
  ncRNA 1..20: ncRNA_class = sgRNA
ctggacaccctggtggggaa

SEQ ID NO: 1173 - RNA, 20 nt, synthetic construct
  source 1..20: mol_type = other RNA
  ncRNA 1..20: ncRNA_class = sgRNA
ggcagaacgcttcagtgagc

SEQ ID NO: 1174 - RNA, 20 nt, synthetic construct
  source 1..20: mol_type = other RNA
  ncRNA 1..20: ncRNA_class = sgRNA
gggagctgcccagcttgcgc

SEQ ID NO: 1175 - RNA, 20 nt, synthetic construct
  source 1..20: mol_type = other RNA
  ncRNA 1..20: ncRNA_class = sgRNA
agttcctgacggctgaggag

SEQ ID NO: 1176 - RNA, 20 nt, synthetic construct
  source 1..20: mol_type = other RNA
  ncRNA 1..20: ncRNA_class = sgRNA
tgggctgtgagacgggcctc

SEQ ID NO: 1177 - RNA, 20 nt, synthetic construct
  source 1..20: mol_type = other RNA
  ncRNA 1..20: ncRNA_class = sgRNA
ctgggaggacctgcgcaagc

SEQ ID NO: 1178 - RNA, 20 nt, synthetic construct
  source 1..20: mol_type = other RNA
  ncRNA 1..20: ncRNA_class = sgRNA
ctttgggctttccctgcgtc

SEQ ID NO: 1179 - RNA, 20 nt, synthetic construct
  source 1..20: mol_type = other RNA
  ncRNA 1..20: ncRNA_class = sgRNA
tgtcagagcggtcatcttcc

SEQ ID NO: 1180 - RNA, 20 nt, synthetic construct
  source 1..20: mol_type = other RNA
  ncRNA 1..20: ncRNA_class = sgRNA
ctgtgcacgatgggcatctt

SEQ ID NO: 1181 - RNA, 20 nt, synthetic construct
  source 1..20: mol_type = other RNA
  ncRNA 1..20: ncRNA_class = sgRNA
catgagcttccgcgtcttgc

SEQ ID NO: 1182 - RNA, 20 nt, synthetic construct
  source 1..20: mol_type = other RNA
  ncRNA 1..20: ncRNA_class = sgRNA
agctgggcagctccctcgcc

SEQ ID NO: 1183 - RNA, 20 nt, synthetic construct
  source 1..20: mol_type = other RNA
  ncRNA 1..20: ncRNA_class = sgRNA
agccagaagctgggaatttc

SEQ ID NO: 1184 - RNA, 20 nt, synthetic construct
  source 1..20: mol_type = other RNA
  ncRNA 1..20: ncRNA_class = sgRNA
actccatggctctggtgctc

SEQ ID NO: 1185 - RNA, 20 nt, synthetic construct
  source 1..20: mol_type = other RNA
  ncRNA 1..20: ncRNA_class = sgRNA
tgaggagcggaagacggagt

SEQ ID NO: 1186 - RNA, 20 nt, synthetic construct
  source 1..20: mol_type = other RNA
  ncRNA 1..20: ncRNA_class = sgRNA
accagggtgtccagctcaat

SEQ ID NO: 1187 - RNA, 20 nt, synthetic construct
  source 1..20: mol_type = other RNA
  ncRNA 1..20: ncRNA_class = sgRNA
ccacacactgggctgtgaga

SEQ ID NO: 1188 - RNA, 20 nt, synthetic construct
  source 1..20: mol_type = other RNA
  ncRNA 1..20: ncRNA_class = sgRNA
tgaagtgttctgcttcagct

SEQ ID NO: 1189 - RNA, 20 nt, synthetic construct
  source 1..20: mol_type = other RNA
  ncRNA 1..20: ncRNA_class = sgRNA
agagctgctgcccattgagc

SEQ ID NO: 1190 - RNA, 20 nt, synthetic construct
  source 1..20: mol_type = other RNA
  ncRNA 1..20: ncRNA_class = sgRNA
tgcctcttggaagacagaga

SEQ ID NO: 1191 - RNA, 20 nt, synthetic construct
  source 1..20: mol_type = other RNA
  ncRNA 1..20: ncRNA_class = sgRNA
gctgggcagctccctcgccc

SEQ ID NO: 1192 - RNA, 20 nt, synthetic construct
  source 1..20: mol_type = other RNA
  ncRNA 1..20: ncRNA_class = sgRNA
ttcccagagcaccagagcca

SEQ ID NO: 1193 - RNA, 20 nt, synthetic construct
  source 1..20: mol_type = other RNA
  ncRNA 1..20: ncRNA_class = sgRNA
cctgtgcacgatgggcatct

SEQ ID NO: 1194 - RNA, 20 nt, synthetic construct
  source 1..20: mol_type = other RNA
  ncRNA 1..20: ncRNA_class = sgRNA
atcctggattctaggacttc

SEQ ID NO: 1195 - RNA, 20 nt, synthetic construct
  source 1..20: mol_type = other RNA
  ncRNA 1..20: ncRNA_class = sgRNA
cttcagtgagctggagcatc

SEQ ID NO: 1196 - RNA, 20 nt, synthetic construct
  source 1..20: mol_type = other RNA
  ncRNA 1..20: ncRNA_class = sgRNA
aacattctccaaattcatcc

SEQ ID NO: 1197 - RNA, 20 nt, synthetic construct
  source 1..20: mol_type = other RNA
  ncRNA 1..20: ncRNA_class = sgRNA
ttgaactcagcttctgctgc

SEQ ID NO: 1198 - RNA, 20 nt, synthetic construct
  source 1..20: mol_type = other RNA
  ncRNA 1..20: ncRNA_class = sgRNA
cccaaagtcacacaggcagc

SEQ ID NO: 1199 - RNA, 20 nt, synthetic construct
  source 1..20: mol_type = other RNA
  ncRNA 1..20: ncRNA_class = sgRNA
acctgctgcctgtgtgactt

SEQ ID NO: 1200 - RNA, 20 nt, synthetic construct
  source 1..20: mol_type = other RNA
  ncRNA 1..20: ncRNA_class = sgRNA
cctgctgcctgtgtgacttt

SEQ ID NO: 1201 - RNA, 20 nt, synthetic construct
  source 1..20: mol_type = other RNA
  ncRNA 1..20: ncRNA_class = sgRNA
aatatgactagcaacaagtc

SEQ ID NO: 1202 - RNA, 20 nt, synthetic construct
  source 1..20: mol_type = other RNA
  ncRNA 1..20: ncRNA_class = sgRNA
caactcccagtggtggcagg

SEQ ID NO: 1203 - RNA, 20 nt, synthetic construct
  source 1..20: mol_type = other RNA
  ncRNA 1..20: ncRNA_class = sgRNA
tagcaacaagtcaggattgc

SEQ ID NO: 1204 - RNA, 20 nt, synthetic construct
  source 1..20: mol_type = other RNA
  ncRNA 1..20: ncRNA_class = sgRNA
ctagtcatatttcaagtgac

SEQ ID NO: 1205 - RNA, 20 nt, synthetic construct
  source 1..20: mol_type = other RNA
  ncRNA 1..20: ncRNA_class = sgRNA
gatatggcaactcccagtgg

SEQ ID NO: 1206 - RNA, 20 nt, synthetic construct
  source 1..20: mol_type = other RNA
  ncRNA 1..20: ncRNA_class = sgRNA
acagatatggcaactcccag

SEQ ID NO: 1207 - RNA, 20 nt, synthetic construct
  source 1..20: mol_type = other RNA
  ncRNA 1..20: ncRNA_class = sgRNA
tggcaactcccagtggtggc

SEQ ID NO: 1208 - RNA, 20 nt, synthetic construct
  source 1..20: mol_type = other RNA
  ncRNA 1..20: ncRNA_class = sgRNA
atcagcctcctgccaccact

SEQ ID NO: 1209 - RNA, 20 nt, synthetic construct
  source 1..20: mol_type = other RNA
  ncRNA 1..20: ncRNA_class = sgRNA
gaagatgatgatgacagata

SEQ ID NO: 1210 - RNA, 20 nt, synthetic construct
  source 1..20: mol_type = other RNA
  ncRNA 1..20: ncRNA_class = sgRNA
catcagcctcctgccaccac

SEQ ID NO: 1211 - RNA, 20 nt, synthetic construct
  source 1..20: mol_type = other RNA
  ncRNA 1..20: ncRNA_class = sgRNA
ctcggggaggagctgctcgg

SEQ ID NO: 1212 - RNA, 20 nt, synthetic construct
  source 1..20: mol_type = other RNA
  ncRNA 1..20: ncRNA_class = sgRNA
agcatctggacaggctctcg

SEQ ID NO: 1213 - RNA, 20 nt, synthetic construct
  source 1..20: mol_type = other RNA
  ncRNA 1..20: ncRNA_class = sgRNA
gtgagctggagcatctggac

SEQ ID NO: 1214 - RNA, 20 nt, synthetic construct
  source 1..20: mol_type = other RNA
  ncRNA 1..20: ncRNA_class = sgRNA
gctctcggggaggagctgct

SEQ ID NO: 1215 - RNA, 20 nt, synthetic construct
  source 1..20: mol_type = other RNA
  ncRNA 1..20: ncRNA_class = sgRNA
gaggagaagattcctgaaga

SEQ ID NO: 1216 - RNA, 20 nt, synthetic construct
  source 1..20: mol_type = other RNA
  ncRNA 1..20: ncRNA_class = sgRNA
atctggacaggctctcgggg

SEQ ID NO: 1217 - RNA, 20 nt, synthetic construct
  source 1..20: mol_type = other RNA
  ncRNA 1..20: ncRNA_class = sgRNA
gagctatttggtagtgttta

SEQ ID NO: 1218 - RNA, 20 nt, synthetic construct
  source 1..20: mol_type = other RNA
  ncRNA 1..20: ncRNA_class = sgRNA
gagcatctggacaggctctc

SEQ ID NO: 1219 - RNA, 20 nt, synthetic construct
  source 1..20: mol_type = other RNA
  ncRNA 1..20: ncRNA_class = sgRNA
ggagcatctggacaggctct

SEQ ID NO: 1220 - RNA, 20 nt, synthetic construct
  source 1..20: mol_type = other RNA
  ncRNA 1..20: ncRNA_class = sgRNA
agagctatttggtagtgttt

SEQ ID NO: 1221 - RNA, 20 nt, synthetic construct
  source 1..20: mol_type = other RNA
  ncRNA 1..20: ncRNA_class = sgRNA
gtgtttagggagccgtcttc

SEQ ID NO: 1222 - RNA, 20 nt, synthetic construct
  source 1..20: mol_type = other RNA
  ncRNA 1..20: ncRNA_class = sgRNA
ccaaggcgctgccctgcgca

SEQ ID NO: 1223 - RNA, 20 nt, synthetic construct
  source 1..20: mol_type = other RNA
  ncRNA 1..20: ncRNA_class = sgRNA
cagcgtgactctgacctgcc

SEQ ID NO: 1224 - RNA, 20 nt, synthetic construct
  source 1..20: mol_type = other RNA
  ncRNA 1..20: ncRNA_class = sgRNA
gcgtgactctgacctgcccg

SEQ ID NO: 1225 - RNA, 20 nt, synthetic construct
  source 1..20: mol_type = other RNA
  ncRNA 1..20: ncRNA_class = sgRNA
cgtgactctgacctgcccgg

SEQ ID NO: 1226 - RNA, 20 nt, synthetic construct
  source 1..20: mol_type = other RNA
  ncRNA 1..20: ncRNA_class = sgRNA
cctgagcacccagtgaacag

SEQ ID NO: 1227 - RNA, 20 nt, synthetic construct
  source 1..20: mol_type = other RNA
  ncRNA 1..20: ncRNA_class = sgRNA
tcggtgcagctccacgactc

SEQ ID NO: 1228 - RNA, 20 nt, synthetic construct
  source 1..20: mol_type = other RNA
  ncRNA 1..20: ncRNA_class = sgRNA
atgaatagtttccagagtcg

SEQ ID NO: 1229 - RNA, 20 nt, synthetic construct
  source 1..20: mol_type = other RNA
  ncRNA 1..20: ncRNA_class = sgRNA
agtgcacagtcccagctggg

SEQ ID NO: 1230 - RNA, 20 nt, synthetic construct
  source 1..20: mol_type = other RNA
  ncRNA 1..20: ncRNA_class = sgRNA
gtcagggatggggtgctccg

SEQ ID NO: 1231 - RNA, 20 nt, synthetic construct
  source 1..20: mol_type = other RNA
  ncRNA 1..20: ncRNA_class = sgRNA
caccccatccctgacgacaa

SEQ ID NO: 1232 - RNA, 20 nt, synthetic construct
  source 1..20: mol_type = other RNA
  ncRNA 1..20: ncRNA_class = sgRNA
tcactgggtgctcaggaagc

SEQ ID NO: 1233 - RNA, 20 nt, synthetic construct
  source 1..20: mol_type = other RNA
  ncRNA 1..20: ncRNA_class = sgRNA
ctgcgcagggcagcgccttg

SEQ ID NO: 1234 - RNA, 20 nt, synthetic construct
  source 1..20: mol_type = other RNA
  ncRNA 1..20: ncRNA_class = sgRNA
aactattcatgctaccgggc

SEQ ID NO: 1235 - RNA, 20 nt, synthetic construct
  source 1..20: mol_type = other RNA
  ncRNA 1..20: ncRNA_class = sgRNA
accgggccggccgcccagct

SEQ ID NO: 1236 - RNA, 20 nt, synthetic construct
  source 1..20: mol_type = other RNA
  ncRNA 1..20: ncRNA_class = sgRNA
tcagcaatgttgtttgtgag

SEQ ID NO: 1237 - RNA, 20 nt, synthetic construct
  source 1..20: mol_type = other RNA
  ncRNA 1..20: ncRNA_class = sgRNA
tggaaactattcatgctacc

SEQ ID NO: 1238 - RNA, 20 nt, synthetic construct
  source 1..20: mol_type = other RNA
  ncRNA 1..20: ncRNA_class = sgRNA
ggagagctggggctcctcgg

SEQ ID NO: 1239 - RNA, 20 nt, synthetic construct
  source 1..20: mol_type = other RNA
  ncRNA 1..20: ncRNA_class = sgRNA
tcacaaacaacattgctgag

SEQ ID NO: 1240 - RNA, 20 nt, synthetic construct
  source 1..20: mol_type = other RNA
  ncRNA 1..20: ncRNA_class = sgRNA
agccagcagcgcgcagccga

SEQ ID NO: 1241 - RNA, 20 nt, synthetic construct
  source 1..20: mol_type = other RNA
  ncRNA 1..20: ncRNA_class = sgRNA
agcgtgactctgacctgccc

SEQ ID NO: 1242 - RNA, 20 nt, synthetic construct
  source 1..20: mol_type = other RNA
  ncRNA 1..20: ncRNA_class = sgRNA
gatgggctggcatgggaagg

SEQ ID NO: 1243 - RNA, 20 nt, synthetic construct
  source 1..20: mol_type = other RNA
  ncRNA 1..20: ncRNA_class = sgRNA
agcaatgttgtttgtgagtg

SEQ ID NO: 1244 - RNA, 20 nt, synthetic construct
  source 1..20: mol_type = other RNA
  ncRNA 1..20: ncRNA_class = sgRNA
cagcctttgtcgtcagggat

SEQ ID NO: 1245 - RNA, 20 nt, synthetic construct
  source 1..20: mol_type = other RNA
  ncRNA 1..20: ncRNA_class = sgRNA
gcacggctcctggaagtctt

SEQ ID NO: 1246 - RNA, 20 nt, synthetic construct
  source 1..20: mol_type = other RNA
  ncRNA 1..20: ncRNA_class = sgRNA
cgggagcggcgctggcccca

SEQ ID NO: 1247 - RNA, 20 nt, synthetic construct
  source 1..20: mol_type = other RNA
  ncRNA 1..20: ncRNA_class = sgRNA
cctgcgcagggcagcgcctt

SEQ ID NO: 1248 - RNA, 20 nt, synthetic construct
  source 1..20: mol_type = other RNA
  ncRNA 1..20: ncRNA_class = sgRNA
ggcgtgctgaccagtctgcc

SEQ ID NO: 1249 - RNA, 20 nt, synthetic construct
  source 1..20: mol_type = other RNA
  ncRNA 1..20: ncRNA_class = sgRNA
ttccggctctacccccgggc

SEQ ID NO: 1250 - RNA, 20 nt, synthetic construct
  source 1..20: mol_type = other RNA
  ncRNA 1..20: ncRNA_class = sgRNA
agacaatgccactgttcact

SEQ ID NO: 1251 - RNA, 20 nt, synthetic construct
  source 1..20: mol_type = other RNA
  ncRNA 1..20: ncRNA_class = sgRNA
gtgctcaggaagccggctgc

SEQ ID NO: 1252 - RNA, 20 nt, synthetic construct
  source 1..20: mol_type = other RNA
  ncRNA 1..20: ncRNA_class = sgRNA
aggctcccaccccagcagat

SEQ ID NO: 1253 - RNA, 20 nt, synthetic construct
  source 1..20: mol_type = other RNA
  ncRNA 1..20: ncRNA_class = sgRNA
gagggggctcttccggaagc

SEQ ID NO: 1254 - RNA, 20 nt, synthetic construct
  source 1..20: mol_type = other RNA
  ncRNA 1..20: ncRNA_class = sgRNA
cagcaatgttgtttgtgagt

SEQ ID NO: 1255 - RNA, 20 nt, synthetic construct
  source 1..20: mol_type = other RNA
  ncRNA 1..20: ncRNA_class = sgRNA
cccagcagatgggctggcat

SEQ ID NO: 1256 - RNA, 20 nt, synthetic construct
  source 1..20: mol_type = other RNA
  ncRNA 1..20: ncRNA_class = sgRNA
gcaagtgcacagtcccagct

SEQ ID NO: 1257 - RNA, 20 nt, synthetic construct
  source 1..20: mol_type = other RNA
  ncRNA 1..20: ncRNA_class = sgRNA
gagagctggggctcctcggg

SEQ ID NO: 1258 - RNA, 20 nt, synthetic construct
  source 1..20: mol_type = other RNA
  ncRNA 1..20: ncRNA_class = sgRNA
gagcacagcctttgtcgtca

SEQ ID NO: 1259 - RNA, 20 nt, synthetic construct
  source 1..20: mol_type = other RNA
  ncRNA 1..20: ncRNA_class = sgRNA
ggccgtcggctgcgcgctgc

SEQ ID NO: 1260 - RNA, 20 nt, synthetic construct
  source 1..20: mol_type = other RNA
  ncRNA 1..20: ncRNA_class = sgRNA
cgctcccggcgcggccagca

SEQ ID NO: 1261 - RNA, 20 nt, synthetic construct
  source 1..20: mol_type = other RNA
  ncRNA 1..20: ncRNA_class = sgRNA
gctgccctgctggccgcgcc

SEQ ID NO: 1262 - RNA, 20 nt, synthetic construct
  source 1..20: mol_type = other RNA
  ncRNA 1..20: ncRNA_class = sgRNA
cacgctgtctcctggcagac

SEQ ID NO: 1263 - RNA, 20 nt, synthetic construct
  source 1..20: mol_type = other RNA
  ncRNA 1..20: ncRNA_class = sgRNA
gccagcccatctgctggggt

SEQ ID NO: 1264 - RNA, 20 nt, synthetic construct
  source 1..20: mol_type = other RNA
  ncRNA 1..20: ncRNA_class = sgRNA
tgggactgtgcacttgctgg

SEQ ID NO: 1265 - RNA, 20 nt, synthetic construct
  source 1..20: mol_type = other RNA
  ncRNA 1..20: ncRNA_class = sgRNA
ttgtttgtgagtggggtcct

SEQ ID NO: 1266 - RNA, 20 nt, synthetic construct
  source 1..20: mol_type = other RNA
  ncRNA 1..20: ncRNA_class = sgRNA
acagcctttgtcgtcaggga

SEQ ID NO: 1267 - RNA, 20 nt, synthetic construct
  source 1..20: mol_type = other RNA
  ncRNA 1..20: ncRNA_class = sgRNA
cttccggaagcaggagagct

SEQ ID NO: 1268 - RNA, 20 nt, synthetic construct
  source 1..20: mol_type = other RNA
  ncRNA 1..20: ncRNA_class = sgRNA
agcctttgtcgtcagggatg

SEQ ID NO: 1269 - RNA, 20 nt, synthetic construct
  source 1..20: mol_type = other RNA
  ncRNA 1..20: ncRNA_class = sgRNA
actgtgcacttgctggtgga

SEQ ID NO: 1270 - RNA, 20 nt, synthetic construct
  source 1..20: mol_type = other RNA
  ncRNA 1..20: ncRNA_class = sgRNA
gacctgcccgggggtagagc

SEQ ID NO: 1271 - RNA, 20 nt, synthetic construct
  source 1..20: mol_type = other RNA
  ncRNA 1..20: ncRNA_class = sgRNA
cccatgccagcccatctgct

SEQ ID NO: 1272 - RNA, 20 nt, synthetic construct
  source 1..20: mol_type = other RNA
  ncRNA 1..20: ncRNA_class = sgRNA
gcagatgggctggcatggga

SEQ ID NO: 1273 - RNA, 20 nt, synthetic construct
  source 1..20: mol_type = other RNA
  ncRNA 1..20: ncRNA_class = sgRNA
agcaagtgcacagtcccagc

SEQ ID NO: 1274 - RNA, 20 nt, synthetic construct
  source 1..20: mol_type = other RNA
  ncRNA 1..20: ncRNA_class = sgRNA
tcttccggaagcaggagagc

SEQ ID NO: 1275 - RNA, 20 nt, synthetic construct
  source 1..20: mol_type = other RNA
  ncRNA 1..20: ncRNA_class = sgRNA
cctgctggccgcgccgggag

SEQ ID NO: 1276 - RNA, 20 nt, synthetic construct
  source 1..20: mol_type = other RNA
  ncRNA 1..20: ncRNA_class = sgRNA
ccactgttcactgggtgctc

SEQ ID NO: 1277 - RNA, 20 nt, synthetic construct
  source 1..20: mol_type = other RNA
  ncRNA 1..20: ncRNA_class = sgRNA
tcccaccccagcagatgggc

SEQ ID NO: 1278 - RNA, 20 nt, synthetic construct
  source 1..20: mol_type = other RNA
  ncRNA 1..20: ncRNA_class = sgRNA
ctggaaactattcatgctac

SEQ ID NO: 1279 - RNA, 20 nt, synthetic construct
  source 1..20: mol_type = other RNA
  ncRNA 1..20: ncRNA_class = sgRNA
ttccggaagcaggagagctg

SEQ ID NO: 1280 - RNA, 20 nt, synthetic construct
  source 1..20: mol_type = other RNA
  ncRNA 1..20: ncRNA_class = sgRNA
ggctgccctgctggccgcgc

SEQ ID NO: 1281 - RNA, 20 nt, synthetic construct
  source 1..20: mol_type = other RNA
  ncRNA 1..20: ncRNA_class = sgRNA
cttggggccagcgccgctcc

SEQ ID NO: 1282 - RNA, 20 nt, synthetic construct
  source 1..20: mol_type = other RNA
  ncRNA 1..20: ncRNA_class = sgRNA
cccaaggcgctgccctgcgc

SEQ ID NO: 1283 - RNA, 20 nt, synthetic construct
  source 1..20: mol_type = other RNA
  ncRNA 1..20: ncRNA_class = sgRNA
ccccagcagatgggctggca

SEQ ID NO: 1284 - RNA, 20 nt, synthetic construct
  source 1..20: mol_type = other RNA
  ncRNA 1..20: ncRNA_class = sgRNA
tcccagctgggcggccggcc

SEQ ID NO: 1285 - RNA, 20 nt, synthetic construct
  source 1..20: mol_type = other RNA
  ncRNA 1..20: ncRNA_class = sgRNA
taccgggccggccgcccagc

SEQ ID NO: 1286 - RNA, 20 nt, synthetic construct
  source 1..20: mol_type = other RNA
  ncRNA 1..20: ncRNA_class = sgRNA
aggagagctggggctcctcg

SEQ ID NO: 1287 - RNA, 20 nt, synthetic construct
  source 1..20: mol_type = other RNA
  ncRNA 1..20: ncRNA_class = sgRNA
cacaaacaacattgctgagg

SEQ ID NO: 1288 - RNA, 20 nt, synthetic construct
  source 1..20: mol_type = other RNA
  ncRNA 1..20: ncRNA_class = sgRNA
gacgacaaaggctgtgctct

SEQ ID NO: 1289 - RNA, 20 nt, synthetic construct
  source 1..20: mol_type = other RNA
  ncRNA 1..20: ncRNA_class = sgRNA
ggccagcgccgctcccggcg

SEQ ID NO: 1290 - RNA, 20 nt, synthetic construct
  source 1..20: mol_type = other RNA
  ncRNA 1..20: ncRNA_class = sgRNA
ctggggtgggagcctgcagc

SEQ ID NO: 1291 - RNA, 20 nt, synthetic construct
  source 1..20: mol_type = other RNA
  ncRNA 1..20: ncRNA_class = sgRNA
aaggaggctgctgctgaggt

SEQ ID NO: 1292 - RNA, 20 nt, synthetic construct
  source 1..20: mol_type = other RNA
  ncRNA 1..20: ncRNA_class = sgRNA
actcacaaacaacattgctg

SEQ ID NO: 1293 - RNA, 20 nt, synthetic construct
  source 1..20: mol_type = other RNA
  ncRNA 1..20: ncRNA_class = sgRNA
cacagtcccagctgggcggc

SEQ ID NO: 1294 - RNA, 20 nt, synthetic construct
  source 1..20: mol_type = other RNA
  ncRNA 1..20: ncRNA_class = sgRNA
caaaggctgtgctcttggtg

SEQ ID NO: 1295 - RNA, 20 nt, synthetic construct
  source 1..20: mol_type = other RNA
  ncRNA 1..20: ncRNA_class = sgRNA
ccctgcgcagggcagcgcct

SEQ ID NO: 1296 - RNA, 20 nt, synthetic construct
  source 1..20: mol_type = other RNA
  ncRNA 1..20: ncRNA_class = sgRNA
agctgggactgtgcacttgc

SEQ ID NO: 1297 - RNA, 20 nt, synthetic construct
  source 1..20: mol_type = other RNA
  ncRNA 1..20: ncRNA_class = sgRNA
ctcacaaacaacattgctga

SEQ ID NO: 1298 - RNA, 20 nt, synthetic construct
  source 1..20: mol_type = other RNA
  ncRNA 1..20: ncRNA_class = sgRNA
tgccagcccatctgctgggg

SEQ ID NO: 1299 - RNA, 20 nt, synthetic construct
  source 1..20: mol_type = other RNA
  ncRNA 1..20: ncRNA_class = sgRNA
ccatgccagcccatctgctg

SEQ ID NO: 1300 - RNA, 20 nt, synthetic construct
  source 1..20: mol_type = other RNA
  ncRNA 1..20: ncRNA_class = sgRNA
gcaggagagctggggctcct

SEQ ID NO: 1301 - RNA, 20 nt, synthetic construct
  source 1..20: mol_type = other RNA
  ncRNA 1..20: ncRNA_class = sgRNA
cattgctgagggggctcttc

SEQ ID NO: 1302 - RNA, 20 nt, synthetic construct
  source 1..20: mol_type = other RNA
  ncRNA 1..20: ncRNA_class = sgRNA
caggctcccaccccagcaga

SEQ ID NO: 1303 - RNA, 20 nt, synthetic construct
  source 1..20: mol_type = other RNA
  ncRNA 1..20: ncRNA_class = sgRNA
agagcacagcctttgtcgtc

SEQ ID NO: 1304 - RNA, 20 nt, synthetic construct
  source 1..20: mol_type = other RNA
  ncRNA 1..20: ncRNA_class = sgRNA
tcccatgccagcccatctgc

SEQ ID NO: 1305 - RNA, 20 nt, synthetic construct
  source 1..20: mol_type = other RNA
  ncRNA 1..20: ncRNA_class = sgRNA
agccccagctctcctgcttc

SEQ ID NO: 1306 - RNA, 20 nt, synthetic construct
  source 1..20: mol_type = other RNA
  ncRNA 1..20: ncRNA_class = sgRNA
ccgctcccggcgcggccagc

SEQ ID NO: 1307 - RNA, 20 nt, synthetic construct
  source 1..20: mol_type = other RNA
  ncRNA 1..20: ncRNA_class = sgRNA
cgcgctgctggctgccctgc

SEQ ID NO: 1308 - RNA, 20 nt, synthetic construct
  source 1..20: mol_type = other RNA
  ncRNA 1..20: ncRNA_class = sgRNA
caggagagctggggctcctc

SEQ ID NO: 1309 - RNA, 20 nt, synthetic construct
  source 1..20: mol_type = other RNA
  ncRNA 1..20: ncRNA_class = sgRNA
tgggaaggaggctgctgctg

SEQ ID NO: 1310 - RNA, 20 nt, synthetic construct
  source 1..20: mol_type = other RNA
  ncRNA 1..20: ncRNA_class = sgRNA
ggccgcgccgggagcggcgc

SEQ ID NO: 1311 - RNA, 20 nt, synthetic construct
  source 1..20: mol_type = other RNA
  ncRNA 1..20: ncRNA_class = sgRNA
ctgccagttagcagtcccgg

SEQ ID NO: 1312 - RNA, 20 nt, synthetic construct
  source 1..20: mol_type = other RNA
  ncRNA 1..20: ncRNA_class = sgRNA
tgccagttagcagtcccgga

SEQ ID NO: 1313 - RNA, 20 nt, synthetic construct
  source 1..20: mol_type = other RNA
  ncRNA 1..20: ncRNA_class = sgRNA
gacactactggcgacgcaca

SEQ ID NO: 1314 - RNA, 20 nt, synthetic construct
  source 1..20: mol_type = other RNA
  ncRNA 1..20: ncRNA_class = sgRNA
tgtgcgtcgccagtagtgtc

SEQ ID NO: 1315 - RNA, 20 nt, synthetic construct
  source 1..20: mol_type = other RNA
  ncRNA 1..20: ncRNA_class = sgRNA
acagattccacaaccctgaa

SEQ ID NO: 1316 - RNA, 20 nt, synthetic construct
  source 1..20: mol_type = other RNA
  ncRNA 1..20: ncRNA_class = sgRNA
caggtgacactgagccagcg

SEQ ID NO: 1317 - RNA, 20 nt, synthetic construct
  source 1..20: mol_type = other RNA
  ncRNA 1..20: ncRNA_class = sgRNA
actcatctttctacagacta

SEQ ID NO: 1318 - RNA, 20 nt, synthetic construct
  source 1..20: mol_type = other RNA
  ncRNA 1..20: ncRNA_class = sgRNA
acggtttgagctcagatatc

SEQ ID NO: 1319 - RNA, 20 nt, synthetic construct
  source 1..20: mol_type = other RNA
  ncRNA 1..20: ncRNA_class = sgRNA
agctcagatatcgggctgaa

SEQ ID NO: 1320 - RNA, 20 nt, synthetic construct
  source 1..20: mol_type = other RNA
  ncRNA 1..20: ncRNA_class = sgRNA
gtcatccacgacgcctggag

SEQ ID NO: 1321 - RNA, 20 nt, synthetic construct
  source 1..20: mol_type = other RNA
  ncRNA 1..20: ncRNA_class = sgRNA
acgacgcctggagcggcctg

SEQ ID NO: 1322 - RNA, 20 nt, synthetic construct
  source 1..20: mol_type = other RNA
  ncRNA 1..20: ncRNA_class = sgRNA
gtggagcgagtggagcccgg

SEQ ID NO: 1323 - RNA, 20 nt, synthetic construct
  source 1..20: mol_type = other RNA
  ncRNA 1..20: ncRNA_class = sgRNA
acctgtccaaggcgtgccca

SEQ ID NO: 1324 - RNA, 20 nt, synthetic construct
  source 1..20: mol_type = other RNA
  ncRNA 1..20: ncRNA_class = sgRNA
gtgactgtgatgttggcagg

SEQ ID NO: 1325 - RNA, 20 nt, synthetic construct
  source 1..20: mol_type = other RNA
  ncRNA 1..20: ncRNA_class = sgRNA
ggtgcagcttcgtgcccagg

SEQ ID NO: 1326 - RNA, 20 nt, synthetic construct
  source 1..20: mol_type = other RNA
  ncRNA 1..20: ncRNA_class = sgRNA
aggtgacactgagccagcgg

SEQ ID NO: 1327 - RNA, 20 nt, synthetic construct
  source 1..20: mol_type = other RNA
  ncRNA 1..20: ncRNA_class = sgRNA
tcaggccgctccaggcgtcg

SEQ ID NO: 1328 - RNA, 20 nt, synthetic construct
  source 1..20: mol_type = other RNA
  ncRNA 1..20: ncRNA_class = sgRNA
gagtggagcccggaggccat

SEQ ID NO: 1329 - RNA, 20 nt, synthetic construct
  source 1..20: mol_type = other RNA
  ncRNA 1..20: ncRNA_class = sgRNA
tagaaagagctgtctccctc

SEQ ID NO: 1330 - RNA, 20 nt, synthetic construct
  source 1..20: mol_type = other RNA
  ncRNA 1..20: ncRNA_class = sgRNA
cacgtgcctcaggccgctcc

SEQ ID NO: 1331 - RNA, 20 nt, synthetic construct
  source 1..20: mol_type = other RNA
  ncRNA 1..20: ncRNA_class = sgRNA
ctggagcggcctgaggcacg

SEQ ID NO: 1332 - RNA, 20 nt, synthetic construct
  source 1..20: mol_type = other RNA
  ncRNA 1..20: ncRNA_class = sgRNA
ggagccgtgccagtattccc

SEQ ID NO: 1333 - RNA, 20 nt, synthetic construct
  source 1..20: mol_type = other RNA
  ncRNA 1..20: ncRNA_class = sgRNA
ctccgggactgctaactggc

SEQ ID NO: 1334 - RNA, 20 nt, synthetic construct
  source 1..20: mol_type = other RNA
  ncRNA 1..20: ncRNA_class = sgRNA
ctcctgccagttagcagtcc

SEQ ID NO: 1335 - RNA, 20 nt, synthetic construct
  source 1..20: mol_type = other RNA
  ncRNA 1..20: ncRNA_class = sgRNA
gccaggtgacactgagccag

SEQ ID NO: 1336 - RNA, 20 nt, synthetic construct
  source 1..20: mol_type = other RNA
  ncRNA 1..20: ncRNA_class = sgRNA
aagatgagttccaggagtgg

SEQ ID NO: 1337 - RNA, 20 nt, synthetic construct
  source 1..20: mol_type = other RNA
  ncRNA 1..20: ncRNA_class = sgRNA
tacggtttgagctcagatat

SEQ ID NO: 1338 - RNA, 20 nt, synthetic construct
  source 1..20: mol_type = other RNA
  ncRNA 1..20: ncRNA_class = sgRNA
aggagttcgggcaaggcgag

SEQ ID NO: 1339 - RNA, 20 nt, synthetic construct
  source 1..20: mol_type = other RNA
  ncRNA 1..20: ncRNA_class = sgRNA
ctccctccgggactgctaac

SEQ ID NO: 1340 - RNA, 20 nt, synthetic construct
  source 1..20: mol_type = other RNA
  ncRNA 1..20: ncRNA_class = sgRNA
cacggcagtgactgtgatgt

SEQ ID NO: 1341 - RNA, 20 nt, synthetic construct
  source 1..20: mol_type = other RNA
  ncRNA 1..20: ncRNA_class = sgRNA
cgagtggagcgagtggagcc

SEQ ID NO: 1342 - RNA, 20 nt, synthetic construct
  source 1..20: mol_type = other RNA
  ncRNA 1..20: ncRNA_class = sgRNA
cggaggccatgggcacgcct

SEQ ID NO: 1343 - RNA, 20 nt, synthetic construct
  source 1..20: mol_type = other RNA
  ncRNA 1..20: ncRNA_class = sgRNA
atgtgcgtcgccagtagtgt

SEQ ID NO: 1344 - RNA, 20 nt, synthetic construct
  source 1..20: mol_type = other RNA
  ncRNA 1..20: ncRNA_class = sgRNA
ccgtggccagaaacccccgc

SEQ ID NO: 1345 - RNA, 20 nt, synthetic construct
  source 1..20: mol_type = other RNA
  ncRNA 1..20: ncRNA_class = sgRNA
aaagatgagttccaggagtg

SEQ ID NO: 1346 - RNA, 20 nt, synthetic construct
  source 1..20: mol_type = other RNA
  ncRNA 1..20: ncRNA_class = sgRNA
aaagacattcacaacatgga

SEQ ID NO: 1347 - RNA, 20 nt, synthetic construct
  source 1..20: mol_type = other RNA
  ncRNA 1..20: ncRNA_class = sgRNA
ttcgtgcccaggaggagttc

SEQ ID NO: 1348 - RNA, 20 nt, synthetic construct
  source 1..20: mol_type = other RNA
  ncRNA 1..20: ncRNA_class = sgRNA
caacatcacagtcactgccg

SEQ ID NO: 1349 - RNA, 20 nt, synthetic construct
  source 1..20: mol_type = other RNA
  ncRNA 1..20: ncRNA_class = sgRNA
gaagctgcaccacgtgcctc

SEQ ID NO: 1350 - RNA, 20 nt, synthetic construct
  source 1..20: mol_type = other RNA
  ncRNA 1..20: ncRNA_class = sgRNA
caaggcgtgcccatggcctc

SEQ ID NO: 1351 - RNA, 20 nt, synthetic construct
  source 1..20: mol_type = other RNA
  ncRNA 1..20: ncRNA_class = sgRNA
ggtcaaagacattcacaaca

SEQ ID NO: 1352 - RNA, 20 nt, synthetic construct
  source 1..20: mol_type = other RNA
  ncRNA 1..20: ncRNA_class = sgRNA
gccttgcccgaactcctcct

SEQ ID NO: 1353 - RNA, 20 nt, synthetic construct
  source 1..20: mol_type = other RNA
  ncRNA 1..20: ncRNA_class = sgRNA
gcccaggaggagttcgggca

SEQ ID NO: 1354 - RNA, 20 nt, synthetic construct
  source 1..20: mol_type = other RNA
  ncRNA 1..20: ncRNA_class = sgRNA
gccatgggcacgccttggac

SEQ ID NO: 1355 - RNA, 20 nt, synthetic construct
  source 1..20: mol_type = other RNA
  ncRNA 1..20: ncRNA_class = sgRNA
ccagcgggggtttctggcca

SEQ ID NO: 1356 - RNA, 20 nt, synthetic construct
  source 1..20: mol_type = other RNA
  ncRNA 1..20: ncRNA_class = sgRNA
cttcgtgcccaggaggagtt

SEQ ID NO: 1357 - RNA, 20 nt, synthetic construct
  source 1..20: mol_type = other RNA
  ncRNA 1..20: ncRNA_class = sgRNA
actcaaacctttcagggttg

SEQ ID NO: 1358 - RNA, 20 nt, synthetic construct
  source 1..20: mol_type = other RNA
  ncRNA 1..20: ncRNA_class = sgRNA
gcagtgactgtgatgttggc

SEQ ID NO: 1359 - RNA, 20 nt, synthetic construct
  source 1..20: mol_type = other RNA
  ncRNA 1..20: ncRNA_class = sgRNA
tctgtagaaagatgagttcc

SEQ ID NO: 1360 - RNA, 20 nt, synthetic construct
  source 1..20: mol_type = other RNA
  ncRNA 1..20: ncRNA_class = sgRNA
cgtggatgacacagtgatgc

SEQ ID NO: 1361 - RNA, 20 nt, synthetic construct
  source 1..20: mol_type = other RNA
  ncRNA 1..20: ncRNA_class = sgRNA
aaggcgtgcccatggcctcc

SEQ ID NO: 1362 - RNA, 20 nt, synthetic construct
  source 1..20: mol_type = other RNA
  ncRNA 1..20: ncRNA_class = sgRNA
gggaatactggcacggctcc

SEQ ID NO: 1363 - RNA, 20 nt, synthetic construct
  source 1..20: mol_type = other RNA
  ncRNA 1..20: ncRNA_class = sgRNA
actgagccagcgggggtttc

SEQ ID NO: 1364 - RNA, 20 nt, synthetic construct
  source 1..20: mol_type = other RNA
  ncRNA 1..20: ncRNA_class = sgRNA
cgtggtgcagcttcgtgccc

SEQ ID NO: 1365 - RNA, 20 nt, synthetic construct
  source 1..20: mol_type = other RNA
  ncRNA 1..20: ncRNA_class = sgRNA
ggcaaggcgagtggagcgag

SEQ ID NO: 1366 - RNA, 20 nt, synthetic construct
  source 1..20: mol_type = other RNA
  ncRNA 1..20: ncRNA_class = sgRNA
gaacttgctcccgacactac

SEQ ID NO: 1367 - RNA, 20 nt, synthetic construct
  source 1..20: mol_type = other RNA
  ncRNA 1..20: ncRNA_class = sgRNA
ccaggtgacactgagccagc

SEQ ID NO: 1368 - RNA, 20 nt, synthetic construct
  source 1..20: mol_type = other RNA
  ncRNA 1..20: ncRNA_class = sgRNA
ggatgacacagtgatgctgg

SEQ ID NO: 1369 - RNA, 20 nt, synthetic construct
  source 1..20: mol_type = other RNA
  ncRNA 1..20: ncRNA_class = sgRNA
agaaagagctgtctccctcc

SEQ ID NO: 1370 - RNA, 20 nt, synthetic construct
  source 1..20: mol_type = other RNA
  ncRNA 1..20: ncRNA_class = sgRNA
cccgctggctcagtgtcacc

SEQ ID NO: 1371 - RNA, 20 nt, synthetic construct
  source 1..20: mol_type = other RNA
  ncRNA 1..20: ncRNA_class = sgRNA
cgagtggagcccggaggcca

SEQ ID NO: 1372 - RNA, 20 nt, synthetic construct
  source 1..20: mol_type = other RNA
  ncRNA 1..20: ncRNA_class = sgRNA
ggagaacttctgggactcct

SEQ ID NO: 1373 - RNA, 20 nt, synthetic construct
  source 1..20: mol_type = other RNA
  ncRNA 1..20: ncRNA_class = sgRNA
agcaaaactcaaacctttca

SEQ ID NO: 1374 - RNA, 20 nt, synthetic construct
  source 1..20: mol_type = other RNA
  ncRNA 1..20: ncRNA_class = sgRNA
cagcaaaactcaaacctttc

SEQ ID NO: 1375 - RNA, 20 nt, synthetic construct
  source 1..20: mol_type = other RNA
  ncRNA 1..20: ncRNA_class = sgRNA
gtgatgttggcaggcggatc

SEQ ID NO: 1376 - RNA, 20 nt, synthetic construct
  source 1..20: mol_type = other RNA
  ncRNA 1..20: ncRNA_class = sgRNA
ccaggagtgggggtcttgcc

SEQ ID NO: 1377 - RNA, 20 nt, synthetic construct
  source 1..20: mol_type = other RNA
  ncRNA 1..20: ncRNA_class = sgRNA
gaaagatgagttccaggagt

SEQ ID NO: 1378 - RNA, 20 nt, synthetic construct
  source 1..20: mol_type = other RNA
  ncRNA 1..20: ncRNA_class = sgRNA
ctaactggcaggagaacttc

SEQ ID NO: 1379 - RNA, 20 nt, synthetic construct
  source 1..20: mol_type = other RNA
  ncRNA 1..20: ncRNA_class = sgRNA
agaaagatgagttccaggag

SEQ ID NO: 1380 - RNA, 20 nt, synthetic construct
  source 1..20: mol_type = other RNA
  ncRNA 1..20: ncRNA_class = sgRNA
tctgggactcctgggaatac

SEQ ID NO: 1381 - RNA, 20 nt, synthetic construct
  source 1..20: mol_type = other RNA
  ncRNA 1..20: ncRNA_class = sgRNA
aggagaacttctgggactcc

SEQ ID NO: 1382 - RNA, 20 nt, synthetic construct
  source 1..20: mol_type = other RNA
  ncRNA 1..20: ncRNA_class = sgRNA
cctggcaagacccccactcc

SEQ ID NO: 1383 - RNA, 20 nt, synthetic construct
  source 1..20: mol_type = other RNA
  ncRNA 1..20: ncRNA_class = sgRNA
cgccttgcccgaactcctcc

SEQ ID NO: 1384 - RNA, 20 nt, synthetic construct
  source 1..20: mol_type = other RNA
  ncRNA 1..20: ncRNA_class = sgRNA
gagtcctccagctgagaacg

SEQ ID NO: 1385 - RNA, 20 nt, synthetic construct
  source 1..20: mol_type = other RNA
  ncRNA 1..20: ncRNA_class = sgRNA
ccacattcctggttgctgga

SEQ ID NO: 1386 - RNA, 20 nt, synthetic construct
  source 1..20: mol_type = other RNA
  ncRNA 1..20: ncRNA_class = sgRNA
gacacctcgttctcagctgg

SEQ ID NO: 1387 - RNA, 20 nt, synthetic construct
  source 1..20: mol_type = other RNA
  ncRNA 1..20: ncRNA_class = sgRNA
gtggacacctcgttctcagc

SEQ ID NO: 1388 - RNA, 20 nt, synthetic construct
  source 1..20: mol_type = other RNA
  ncRNA 1..20: ncRNA_class = sgRNA
cctccagcaaccaggaatgt

SEQ ID NO: 1389 - RNA, 20 nt, synthetic construct
  source 1..20: mol_type = other RNA
  ncRNA 1..20: ncRNA_class = sgRNA
ccctccagcaaccaggaatg

SEQ ID NO: 1390 - RNA, 20 nt, synthetic construct
  source 1..20: mol_type = other RNA
  ncRNA 1..20: ncRNA_class = sgRNA
gcaaccaggaatgtgggcag

SEQ ID NO: 1391 - RNA, 20 nt, synthetic construct
  source 1..20: mol_type = other RNA
  ncRNA 1..20: ncRNA_class = sgRNA
agtaccactgcccacattcc

SEQ ID NO: 1392 - RNA, 20 nt, synthetic construct
  source 1..20: mol_type = other RNA
  ncRNA 1..20: ncRNA_class = sgRNA
ccaggctccctccagcaacc

SEQ ID NO: 1393 - RNA, 20 nt, synthetic construct
  source 1..20: mol_type = other RNA
  ncRNA 1..20: ncRNA_class = sgRNA
ctgcccacattcctggttgc

SEQ ID NO: 1394 - RNA, 20 nt, synthetic construct
  source 1..20: mol_type = other RNA
  ncRNA 1..20: ncRNA_class = sgRNA
cccacattcctggttgctgg

SEQ ID NO: 1395 - RNA, 20 nt, synthetic construct
  source 1..20: mol_type = other RNA
  ncRNA 1..20: ncRNA_class = sgRNA
gttctcagctggaggactcc

SEQ ID NO: 1396 - RNA, 20 nt, synthetic construct
  source 1..20: mol_type = other RNA
  ncRNA 1..20: ncRNA_class = sgRNA
gcaaatgcgacaagcctccc

SEQ ID NO: 1397 - RNA, 20 nt, synthetic construct
  source 1..20: mol_type = other RNA
  ncRNA 1..20: ncRNA_class = sgRNA
agctgccccaaagagtacgg

SEQ ID NO: 1398 - RNA, 20 nt, synthetic construct
  source 1..20: mol_type = other RNA
  ncRNA 1..20: ncRNA_class = sgRNA
tcgaggtattgtcagacccc

SEQ ID NO: 1399 - RNA, 20 nt, synthetic construct
  source 1..20: mol_type = other RNA
  ncRNA 1..20: ncRNA_class = sgRNA
aatgcagaggagcgttccga

SEQ ID NO: 1400 - RNA, 20 nt, synthetic construct
  source 1..20: mol_type = other RNA
  ncRNA 1..20: ncRNA_class = sgRNA
atctggtcggttgtggctcg

SEQ ID NO: 1401 - RNA, 20 nt, synthetic construct
  source 1..20: mol_type = other RNA
  ncRNA 1..20: ncRNA_class = sgRNA
ctgatgtcataagggctccg

SEQ ID NO: 1402 - RNA, 20 nt, synthetic construct
  source 1..20: mol_type = other RNA
  ncRNA 1..20: ncRNA_class = sgRNA
tgcatccgccgtactctttg

SEQ ID NO: 1403 - RNA, 20 nt, synthetic construct
  source 1..20: mol_type = other RNA
  ncRNA 1..20: ncRNA_class = sgRNA
tcagaacaatggcaatgcag

SEQ ID NO: 1404 - RNA, 20 nt, synthetic construct
  source 1..20: mol_type = other RNA
  ncRNA 1..20: ncRNA_class = sgRNA
aagctgcgggctctgaagga

SEQ ID NO: 1405 - RNA, 20 nt, synthetic construct
  source 1..20: mol_type = other RNA
  ncRNA 1..20: ncRNA_class = sgRNA
tgatgtcataagggctccgt

SEQ ID NO: 1406 - RNA, 20 nt, synthetic construct
  source 1..20: mol_type = other RNA
  ncRNA 1..20: ncRNA_class = sgRNA
agaggagcgttccgaaggcc

SEQ ID NO: 1407 - RNA, 20 nt, synthetic construct
  source 1..20: mol_type = other RNA
  ncRNA 1..20: ncRNA_class = sgRNA
gacaccggtggggagatgag

SEQ ID NO: 1408 - RNA, 20 nt, synthetic construct
  source 1..20: mol_type = other RNA
  ncRNA 1..20: ncRNA_class = sgRNA
ccacaaccgaccagatgcca

SEQ ID NO: 1409 - RNA, 20 nt, synthetic construct
  source 1..20: mol_type = other RNA
  ncRNA 1..20: ncRNA_class = sgRNA
tctgcattgccattgttctg

SEQ ID NO: 1410 - RNA, 20 nt, synthetic construct
  source 1..20: mol_type = other RNA
  ncRNA 1..20: ncRNA_class = sgRNA
accagctgccccaaagagta

SEQ ID NO: 1411 - RNA, 20 nt, synthetic construct
  source 1..20: mol_type = other RNA
  ncRNA 1..20: ncRNA_class = sgRNA
gctgctgggggacaccggtg

SEQ ID NO: 1412 - RNA, 20 nt, synthetic construct
  source 1..20: mol_type = other RNA
  ncRNA 1..20: ncRNA_class = sgRNA
ccctggcatctggtcggttg

SEQ ID NO: 1413 - RNA, 20 nt, synthetic construct
  source 1..20: mol_type = other RNA
  ncRNA 1..20: ncRNA_class = sgRNA
gtgggtccctggcatctggt

SEQ ID NO: 1414 - RNA, 20 nt, synthetic construct
  source 1..20: mol_type = other RNA
  ncRNA 1..20: ncRNA_class = sgRNA
ataagggctccgtgggtccc

SEQ ID NO: 1415 - RNA, 20 nt, synthetic construct
  source 1..20: mol_type = other RNA
  ncRNA 1..20: ncRNA_class = sgRNA
catgcatccgccgtactctt

SEQ ID NO: 1416 - RNA, 20 nt, synthetic construct
  source 1..20: mol_type = other RNA
  ncRNA 1..20: ncRNA_class = sgRNA
ggggtgggtcgaggcctctc

SEQ ID NO: 1417 - RNA, 20 nt, synthetic construct
  source 1..20: mol_type = other RNA
  ncRNA 1..20: ncRNA_class = sgRNA
tgttcctctcatctccccac

SEQ ID NO: 1418 - RNA, 20 nt, synthetic construct
  source 1..20: mol_type = other RNA
  ncRNA 1..20: ncRNA_class = sgRNA
ggctgctgggggacaccggt

SEQ ID NO: 1419 - RNA, 20 nt, synthetic construct
  source 1..20: mol_type = other RNA
  ncRNA 1..20: ncRNA_class = sgRNA
cggtgtcccccagcagcctg

SEQ ID NO: 1420 - RNA, 20 nt, synthetic construct
  source 1..20: mol_type = other RNA
  ncRNA 1..20: ncRNA_class = sgRNA
ctccgtgggtccctggcatc

SEQ ID NO: 1421 - RNA, 20 nt, synthetic construct
  source 1..20: mol_type = other RNA
  ncRNA 1..20: ncRNA_class = sgRNA
gccacaaccgaccagatgcc

SEQ ID NO: 1422 - RNA, 20 nt, synthetic construct
  source 1..20: mol_type = other RNA
  ncRNA 1..20: ncRNA_class = sgRNA
ctgtattgctgatgtcataa

SEQ ID NO: 1423 - RNA, 20 nt, synthetic construct
  source 1..20: mol_type = other RNA
  ncRNA 1..20: ncRNA_class = sgRNA
tggggcagctggtcccggag

SEQ ID NO: 1424 - RNA, 20 nt, synthetic construct
  source 1..20: mol_type = other RNA
  ncRNA 1..20: ncRNA_class = sgRNA
aggctgctgggggacaccgg

SEQ ID NO: 1425 - RNA, 20 nt, synthetic construct
  source 1..20: mol_type = other RNA
  ncRNA 1..20: ncRNA_class = sgRNA
gaccagatgccagggaccca

SEQ ID NO: 1426 - RNA, 20 nt, synthetic construct
  source 1..20: mol_type = other RNA
  ncRNA 1..20: ncRNA_class = sgRNA
gtggaagctgcgggctctga

SEQ ID NO: 1427 - RNA, 20 nt, synthetic construct
  source 1..20: mol_type = other RNA
  ncRNA 1..20: ncRNA_class = sgRNA
cccaggctgctgggggacac

SEQ ID NO: 1428 - RNA, 20 nt, synthetic construct
  source 1..20: mol_type = other RNA
  ncRNA 1..20: ncRNA_class = sgRNA
gctggagggagcctggcctt

SEQ ID NO: 1429 - RNA, 20 nt, synthetic construct
  source 1..20: mol_type = other RNA
  ncRNA 1..20: ncRNA_class = sgRNA
atgcatccgccgtactcttt

SEQ ID NO: 1430 - RNA, 20 nt, synthetic construct
  source 1..20: mol_type = other RNA
  ncRNA 1..20: ncRNA_class = sgRNA
gggtgggtcgaggcctctcc

SEQ ID NO: 1431 - RNA, 20 nt, synthetic construct
  source 1..20: mol_type = other RNA
  ncRNA 1..20: ncRNA_class = sgRNA
acaagcactggggtgggtcg

SEQ ID NO: 1432 - RNA, 20 nt, synthetic construct
  source 1..20: mol_type = other RNA
  ncRNA 1..20: ncRNA_class = sgRNA
agaggaacaagcactggggt

SEQ ID NO: 1433 - RNA, 20 nt, synthetic construct
  source 1..20: mol_type = other RNA
  ncRNA 1..20: ncRNA_class = sgRNA
gccgtactctttggggcagc

SEQ ID NO: 1434 - RNA, 20 nt, synthetic construct
  source 1..20: mol_type = other RNA
  ncRNA 1..20: ncRNA_class = sgRNA
ctctttggggcagctggtcc

SEQ ID NO: 1435 - RNA, 20 nt, synthetic construct
  source 1..20: mol_type = other RNA
  ncRNA 1..20: ncRNA_class = sgRNA
gagaggaacaagcactgggg

SEQ ID NO: 1436 - RNA, 20 nt, synthetic construct
  source 1..20: mol_type = other RNA
  ncRNA 1..20: ncRNA_class = sgRNA
ttgtcagaccccaggctgct

SEQ ID NO: 1437 - RNA, 20 nt, synthetic construct
  source 1..20: mol_type = other RNA
  ncRNA 1..20: ncRNA_class = sgRNA
gtcagaccccaggctgctgg

SEQ ID NO: 1438 - RNA, 20 nt, synthetic construct
  source 1..20: mol_type = other RNA
  ncRNA 1..20: ncRNA_class = sgRNA
gagatgagaggaacaagcac

SEQ ID NO: 1439 - RNA, 20 nt, synthetic construct
  source 1..20: mol_type = other RNA
  ncRNA 1..20: ncRNA_class = sgRNA
tctgtattgctgatgtcata

SEQ ID NO: 1440 - RNA, 20 nt, synthetic construct
  source 1..20: mol_type = other RNA
  ncRNA 1..20: ncRNA_class = sgRNA
cctggttgctggagggagcc

SEQ ID NO: 1441 - RNA, 20 nt, synthetic construct
  source 1..20: mol_type = other RNA
  ncRNA 1..20: ncRNA_class = sgRNA
accggtgtcccccagcagcc

SEQ ID NO: 1442 - RNA, 20 nt, synthetic construct
  source 1..20: mol_type = other RNA
  ncRNA 1..20: ncRNA_class = sgRNA
attgtcagaccccaggctgc

SEQ ID NO: 1443 - RNA, 20 nt, synthetic construct
  source 1..20: mol_type = other RNA
  ncRNA 1..20: ncRNA_class = sgRNA
ccggtgtcccccagcagcct

SEQ ID NO: 1444 - RNA, 20 nt, synthetic construct
  source 1..20: mol_type = other RNA
  ncRNA 1..20: ncRNA_class = sgRNA
tgtcagaccccaggctgctg

SEQ ID NO: 1445 - RNA, 20 nt, synthetic construct
  source 1..20: mol_type = other RNA
  ncRNA 1..20: ncRNA_class = sgRNA
agtggtgaggaaaataaaca

SEQ ID NO: 1446 - RNA, 20 nt, synthetic construct
  source 1..20: mol_type = other RNA
  ncRNA 1..20: ncRNA_class = sgRNA
ggtgaacttctagatccatg

SEQ ID NO: 1447 - RNA, 20 nt, synthetic construct
  source 1..20: mol_type = other RNA
  ncRNA 1..20: ncRNA_class = sgRNA
tcaggactgatataaccaca

SEQ ID NO: 1448 - RNA, 20 nt, synthetic construct
  source 1..20: mol_type = other RNA
  ncRNA 1..20: ncRNA_class = sgRNA
gctccttaggaatagtaaaa

SEQ ID NO: 1449 - RNA, 20 nt, synthetic construct
  source 1..20: mol_type = other RNA
  ncRNA 1..20: ncRNA_class = sgRNA
tatatctgtaaaggtgacac

SEQ ID NO: 1450 - RNA, 20 nt, synthetic construct
  source 1..20: mol_type = other RNA
  ncRNA 1..20: ncRNA_class = sgRNA
tgtgctaaaggaaaaatgta

SEQ ID NO: 1451 - RNA, 20 nt, synthetic construct
  source 1..20: mol_type = other RNA
  ncRNA 1..20: ncRNA_class = sgRNA
taaatgctaattacattgtc

SEQ ID NO: 1452 - RNA, 20 nt, synthetic construct
  source 1..20: mol_type = other RNA
  ncRNA 1..20: ncRNA_class = sgRNA
acttgcaacattcttacatt

SEQ ID NO: 1453 - RNA, 20 nt, synthetic construct
  source 1..20: mol_type = other RNA
  ncRNA 1..20: ncRNA_class = sgRNA
taatgaagctatatctgtaa

SEQ ID NO: 1454 - RNA, 20 nt, synthetic construct
  source 1..20: mol_type = other RNA
  ncRNA 1..20: ncRNA_class = sgRNA
agttgtacaactggagattc

SEQ ID NO: 1455 - RNA, 20 nt, synthetic construct
  source 1..20: mol_type = other RNA
  ncRNA 1..20: ncRNA_class = sgRNA
atgatagtatattgctcctt

SEQ ID NO: 1456 - RNA, 20 nt, synthetic construct
  source 1..20: mol_type = other RNA
  ncRNA 1..20: ncRNA_class = sgRNA
cactgcagtttgtgtgctaa

SEQ ID NO: 1457 - RNA, 20 nt, synthetic construct
  source 1..20: mol_type = other RNA
  ncRNA 1..20: ncRNA_class = sgRNA
cagcttgaacagaatgttta

SEQ ID NO: 1458 - RNA, 20 nt, synthetic construct
  source 1..20: mol_type = other RNA
  ncRNA 1..20: ncRNA_class = sgRNA
ttagaatgaagttgtacaac

SEQ ID NO: 1459 - RNA, 20 nt, synthetic construct
  source 1..20: mol_type = other RNA
  ncRNA 1..20: ncRNA_class = sgRNA
aaaccattttactattccta

SEQ ID NO: 1460 - RNA, 20 nt, synthetic construct
  source 1..20: mol_type = other RNA
  ncRNA 1..20: ncRNA_class = sgRNA
ttgagttgcattgtgaacga

SEQ ID NO: 1461 - RNA, 20 nt, synthetic construct
  source 1..20: mol_type = other RNA
  ncRNA 1..20: ncRNA_class = sgRNA
tgagttgcattgtgaacgag

SEQ ID NO: 1462 - RNA, 20 nt, synthetic construct
  source 1..20: mol_type = other RNA
  ncRNA 1..20: ncRNA_class = sgRNA
tttatcagtgatcaactcag

SEQ ID NO: 1463 - RNA, 20 nt, synthetic construct
  source 1..20: mol_type = other RNA
  ncRNA 1..20: ncRNA_class = sgRNA
ggaccaaagatgcctcaact

SEQ ID NO: 1464 - RNA, 20 nt, synthetic construct
  source 1..20: mol_type = other RNA
  ncRNA 1..20: ncRNA_class = sgRNA
agatgcctcaacttggagcc

SEQ ID NO: 1465 - RNA, 20 nt, synthetic construct
  source 1..20: mol_type = other RNA
  ncRNA 1..20: ncRNA_class = sgRNA
gtggatgctgtgtcttcagg

SEQ ID NO: 1466 - RNA, 20 nt, synthetic construct
  source 1..20: mol_type = other RNA
  ncRNA 1..20: ncRNA_class = sgRNA
gtttaggattcgctgtatga

SEQ ID NO: 1467 - RNA, 20 nt, synthetic construct
  source 1..20: mol_type = other RNA
  ncRNA 1..20: ncRNA_class = sgRNA
actggagtgaagaagcaagt

SEQ ID NO: 1468 - RNA, 20 nt, synthetic construct
  source 1..20: mol_type = other RNA
  ncRNA 1..20: ncRNA_class = sgRNA
gacagtgaatgaagatcggg

SEQ ID NO: 1469 - RNA, 20 nt, synthetic construct
  source 1..20: mol_type = other RNA
  ncRNA 1..20: ncRNA_class = sgRNA
atcaacagtgcatgaggtgg

SEQ ID NO: 1470 - RNA, 20 nt, synthetic construct
  source 1..20: mol_type = other RNA
  ncRNA 1..20: ncRNA_class = sgRNA
aatcaacagtgcatgaggtg

SEQ ID NO: 1471 - RNA, 20 nt, synthetic construct
  source 1..20: mol_type = other RNA
  ncRNA 1..20: ncRNA_class = sgRNA
ataatcaacagtgcatgagg

SEQ ID NO: 1472 - RNA, 20 nt, synthetic construct
  source 1..20: mol_type = other RNA
  ncRNA 1..20: ncRNA_class = sgRNA
agaataatcaacagtgcatg

SEQ ID NO: 1473 - RNA, 20 nt, synthetic construct
  source 1..20: mol_type = other RNA
  ncRNA 1..20: ncRNA_class = sgRNA
atctgatgtaaccttcccaa

SEQ ID NO: 1474 - RNA, 20 nt, synthetic construct
  source 1..20: mol_type = other RNA
  ncRNA 1..20: ncRNA_class = sgRNA
aacactcttaatacttgggt

SEQ ID NO: 1475 - RNA, 20 nt, synthetic construct
  source 1..20: mol_type = other RNA
  ncRNA 1..20: ncRNA_class = sgRNA
ttggacagtgaatgaagatc

SEQ ID NO: 1476 - RNA, 20 nt, synthetic construct
  source 1..20: mol_type = other RNA
  ncRNA 1..20: ncRNA_class = sgRNA
gactggagtgaagaagcaag

SEQ ID NO: 1477 - RNA, 20 nt, synthetic construct
  source 1..20: mol_type = other RNA
  ncRNA 1..20: ncRNA_class = sgRNA
tttgagttgcattgtgaacg

SEQ ID NO: 1478 - RNA, 20 nt, synthetic construct
  source 1..20: mol_type = other RNA
  ncRNA 1..20: ncRNA_class = sgRNA
atgaggtgtgagtgggatgg

SEQ ID NO: 1479 - RNA, 20 nt, synthetic construct
  source 1..20: mol_type = other RNA
  ncRNA 1..20: ncRNA_class = sgRNA
taatcaacagtgcatgaggt

SEQ ID NO: 1480 - RNA, 20 nt, synthetic construct
  source 1..20: mol_type = other RNA
  ncRNA 1..20: ncRNA_class = sgRNA
ttataacactcttaatactt

SEQ ID NO: 1481 - RNA, 20 nt, synthetic construct
  source 1..20: mol_type = other RNA
  ncRNA 1..20: ncRNA_class = sgRNA
tgtatgaaggaagatggtaa

SEQ ID NO: 1482 - RNA, 20 nt, synthetic construct
  source 1..20: mol_type = other RNA
  ncRNA 1..20: ncRNA_class = sgRNA
aggaagatggtaagggatac

SEQ ID NO: 1483 - RNA, 20 nt, synthetic construct
  source 1..20: mol_type = other RNA
  ncRNA 1..20: ncRNA_class = sgRNA
tggtggaagggaaacacact

SEQ ID NO: 1484 - RNA, 20 nt, synthetic construct
  source 1..20: mol_type = other RNA
  ncRNA 1..20: ncRNA_class = sgRNA
atcactgataaattatgtgg

SEQ ID NO: 1485 - RNA, 20 nt, synthetic construct
  source 1..20: mol_type = other RNA
  ncRNA 1..20: ncRNA_class = sgRNA
attcgctgtatgaaggaaga

SEQ ID NO: 1486 - RNA, 20 nt, synthetic construct
  source 1..20: mol_type = other RNA
  ncRNA 1..20: ncRNA_class = sgRNA
gtaagggatactggagtgac

SEQ ID NO: 1487 - RNA, 20 nt, synthetic construct
  source 1..20: mol_type = other RNA
  ncRNA 1..20: ncRNA_class = sgRNA
gaagaaaatgaggtgtgagt

SEQ ID NO: 1488 - RNA, 20 nt, synthetic construct
  source 1..20: mol_type = other RNA
  ncRNA 1..20: ncRNA_class = sgRNA
gatctgatgtaaccttccca

SEQ ID NO: 1489 - RNA, 20 nt, synthetic construct
  source 1..20: mol_type = other RNA
  ncRNA 1..20: ncRNA_class = sgRNA
tgaacgaggggaagaaaatg

SEQ ID NO: 1490 - RNA, 20 nt, synthetic construct
  source 1..20: mol_type = other RNA
  ncRNA 1..20: ncRNA_class = sgRNA
tagaagcagagaatgccctt

SEQ ID NO: 1491 - RNA, 20 nt, synthetic construct
  source 1..20: mol_type = other RNA
  ncRNA 1..20: ncRNA_class = sgRNA
gctccaagttgaggcatctt

SEQ ID NO: 1492 - RNA, 20 nt, synthetic construct
  source 1..20: mol_type = other RNA
  ncRNA 1..20: ncRNA_class = sgRNA
cttggacagtgaatgaagat

SEQ ID NO: 1493 - RNA, 20 nt, synthetic construct
  source 1..20: mol_type = other RNA
  ncRNA 1..20: ncRNA_class = sgRNA
ctgtatgaaggaagatggta

SEQ ID NO: 1494 - RNA, 20 nt, synthetic construct
  source 1..20: mol_type = other RNA
  ncRNA 1..20: ncRNA_class = sgRNA
aattttgatcctgtatataa

SEQ ID NO: 1495 - RNA, 20 nt, synthetic construct
  source 1..20: mol_type = other RNA
  ncRNA 1..20: ncRNA_class = sgRNA
ttgatcactgataaattatg

SEQ ID NO: 1496 - RNA, 20 nt, synthetic construct
  source 1..20: mol_type = other RNA
  ncRNA 1..20: ncRNA_class = sgRNA
ggaagaaaatgaggtgtgag

SEQ ID NO: 1497 - RNA, 20 nt, synthetic construct
  source 1..20: mol_type = other RNA
  ncRNA 1..20: ncRNA_class = sgRNA
ctgtaaaaggtttaaggtct

SEQ ID NO: 1498 - RNA, 20 nt, synthetic construct
  source 1..20: mol_type = other RNA
  ncRNA 1..20: ncRNA_class = sgRNA
gtgtgagtgggatggtggaa

SEQ ID NO: 1499 - RNA, 20 nt, synthetic construct
  source 1..20: mol_type = other RNA
  ncRNA 1..20: ncRNA_class = sgRNA
gtagaagcagagaatgccct

SEQ ID NO: 1500 - RNA, 20 nt, synthetic construct
  source 1..20: mol_type = other RNA
  ncRNA 1..20: ncRNA_class = sgRNA
cgggtggatgctgtgtcttc

SEQ ID NO: 1501 - RNA, 20 nt, synthetic construct
  source 1..20: mol_type = other RNA
  ncRNA 1..20: ncRNA_class = sgRNA
agcagagaatgcccttggga

SEQ ID NO: 1502 - RNA, 20 nt, synthetic construct
  source 1..20: mol_type = other RNA
  ncRNA 1..20: ncRNA_class = sgRNA
tgataaattatgtggcggat

SEQ ID NO: 1503 - RNA, 20 nt, synthetic construct
  source 1..20: mol_type = other RNA
  ncRNA 1..20: ncRNA_class = sgRNA
aaaatgaggtgtgagtggga

SEQ ID NO: 1504 - RNA, 20 nt, synthetic construct
  source 1..20: mol_type = other RNA
  ncRNA 1..20: ncRNA_class = sgRNA
ggtgtgagtgggatggtgga

SEQ ID NO: 1505 - RNA, 20 nt, synthetic construct
  source 1..20: mol_type = other RNA
  ncRNA 1..20: ncRNA_class = sgRNA
ctagtatcttaaaattgaca

SEQ ID NO: 1506 - RNA, 20 nt, synthetic construct
  source 1..20: mol_type = other RNA
  ncRNA 1..20: ncRNA_class = sgRNA
attataacactcttaatact

SEQ ID NO: 1507 - RNA, 20 nt, synthetic construct
  source 1..20: mol_type = other RNA
  ncRNA 1..20: ncRNA_class = sgRNA
tatggaatcacaataatttc

SEQ ID NO: 1508 - RNA, 20 nt, synthetic construct
  source 1..20: mol_type = other RNA
  ncRNA 1..20: ncRNA_class = sgRNA
gataaattatgtggcggatt

SEQ ID NO: 1509 - RNA, 20 nt, synthetic construct
  source 1..20: mol_type = other RNA
  ncRNA 1..20: ncRNA_class = sgRNA
catattctgtaaaaggttta

SEQ ID NO: 1510 - RNA, 20 nt, synthetic construct
  source 1..20: mol_type = other RNA
  ncRNA 1..20: ncRNA_class = sgRNA
ctaaacacatattctgtaaa

SEQ ID NO: 1511 - RNA, 20 nt, synthetic construct
  source 1..20: mol_type = other RNA
  ncRNA 1..20: ncRNA_class = sgRNA
ttttgtcaacattgaagtct

SEQ ID NO: 1512 - RNA, 20 nt, synthetic construct
  source 1..20: mol_type = other RNA
  ncRNA 1..20: ncRNA_class = sgRNA
attttgtcaacattgaagtc

SEQ ID NO: 1513 - RNA, 20 nt, synthetic construct
  source 1..20: mol_type = other RNA
  ncRNA 1..20: ncRNA_class = sgRNA
acaatgcaactcaaattttt

SEQ ID NO: 1514 - RNA, 20 nt, synthetic construct
  source 1..20: mol_type = other RNA
  ncRNA 1..20: ncRNA_class = sgRNA
caaagagtcatattgcccag

SEQ ID NO: 1515 - RNA, 20 nt, synthetic construct
  source 1..20: mol_type = other RNA
  ncRNA 1..20: ncRNA_class = sgRNA
cttacccttggaggagtgtg

SEQ ID NO: 1516 - RNA, 20 nt, synthetic construct
  source 1..20: mol_type = other RNA
  ncRNA 1..20: ncRNA_class = sgRNA
tgtgtaccacggtagaatac

SEQ ID NO: 1517 - RNA, 20 nt, synthetic construct
  source 1..20: mol_type = other RNA
  ncRNA 1..20: ncRNA_class = sgRNA
cactgtccagtattctaccg

SEQ ID NO: 1518 - RNA, 20 nt, synthetic construct
  source 1..20: mol_type = other RNA
  ncRNA 1..20: ncRNA_class = sgRNA
tctgtagccactgtgtacca

SEQ ID NO: 1519 - RNA, 20 nt, synthetic construct
  source 1..20: mol_type = other RNA
  ncRNA 1..20: ncRNA_class = sgRNA
tattctaccgtggtacacag

SEQ ID NO: 1520 - RNA, 20 nt, synthetic construct
  source 1..20: mol_type = other RNA
  ncRNA 1..20: ncRNA_class = sgRNA
agacttggactgacggaact

SEQ ID NO: 1521 - RNA, 20 nt, synthetic construct
  source 1..20: mol_type = other RNA
  ncRNA 1..20: ncRNA_class = sgRNA
atttgaaacagttggcatgg

SEQ ID NO: 1522 - RNA, 20 nt, synthetic construct
  source 1..20: mol_type = other RNA
  ncRNA 1..20: ncRNA_class = sgRNA
ccgccttgccgtacagtctg

SEQ ID NO: 1523 - RNA, 20 nt, synthetic construct
  source 1..20: mol_type = other RNA
  ncRNA 1..20: ncRNA_class = sgRNA
gttacttaccacagactgta

SEQ ID NO: 1524 - RNA, 20 nt, synthetic construct
  source 1..20: mol_type = other RNA
  ncRNA 1..20: ncRNA_class = sgRNA
ttaccacagactgtacggca

SEQ ID NO: 1525 - RNA, 20 nt, synthetic construct
  source 1..20: mol_type = other RNA
  ncRNA 1..20: ncRNA_class = sgRNA
ccacagactgtacggcaagg

SEQ ID NO: 1526 - RNA, 20 nt, synthetic construct
  source 1..20: mol_type = other RNA
  ncRNA 1..20: ncRNA_class = sgRNA
gtcacctcacactcctccaa

SEQ ID NO: 1527 - RNA, 20 nt, synthetic construct
  source 1..20: mol_type = other RNA
  ncRNA 1..20: ncRNA_class = sgRNA
gacacagcagtggtattggg

SEQ ID NO: 1528 - RNA, 20 nt, synthetic construct
  source 1..20: mol_type = other RNA
  ncRNA 1..20: ncRNA_class = sgRNA
ttagtagatcatgtagatgg

SEQ ID NO: 1529 - RNA, 20 nt, synthetic construct
  source 1..20: mol_type = other RNA
  ncRNA 1..20: ncRNA_class = sgRNA
atggaggctgcgactgatga

SEQ ID NO: 1530 - RNA, 20 nt, synthetic construct
  source 1..20: mol_type = other RNA
  ncRNA 1..20: ncRNA_class = sgRNA
aggagtgtgaggtgaccact

SEQ ID NO: 1531 - RNA, 20 nt, synthetic construct
  source 1..20: mol_type = other RNA
  ncRNA 1..20: ncRNA_class = sgRNA
cgctcctctgaatctaacaa

SEQ ID NO: 1532 - RNA, 20 nt, synthetic construct
  source 1..20: mol_type = other RNA
  ncRNA 1..20: ncRNA_class = sgRNA
actcggatcttgagaagact

SEQ ID NO: 1533 - RNA, 20 nt, synthetic construct
  source 1..20: mol_type = other RNA
  ncRNA 1..20: ncRNA_class = sgRNA
gcaagtttcatcagtcaatg

SEQ ID NO: 1534 - RNA, 20 nt, synthetic construct
  source 1..20: mol_type = other RNA
  ncRNA 1..20: ncRNA_class = sgRNA
tgtttgaagtactgttgcct

SEQ ID NO: 1535 - RNA, 20 nt, synthetic construct
  source 1..20: mol_type = other RNA
  ncRNA 1..20: ncRNA_class = sgRNA
tgggcaatatgactctttga

SEQ ID NO: 1536 - RNA, 20 nt, synthetic construct
  source 1..20: mol_type = other RNA
  ncRNA 1..20: ncRNA_class = sgRNA
gcggtgatggtattttgccc

SEQ ID NO: 1537 - RNA, 20 nt, synthetic construct
  source 1..20: mol_type = other RNA
  ncRNA 1..20: ncRNA_class = sgRNA
aagatttgaaacagttggca

SEQ ID NO: 1538 - RNA, 20 nt, synthetic construct
  source 1..20: mol_type = other RNA
  ncRNA 1..20: ncRNA_class = sgRNA
gtctgtggtaagtaactttt

SEQ ID NO: 1539 - RNA, 20 nt, synthetic construct
  source 1..20: mol_type = other RNA
  ncRNA 1..20: ncRNA_class = sgRNA
ggtcacctcacactcctcca

SEQ ID NO: 1540 - RNA, 20 nt, synthetic construct
  source 1..20: mol_type = other RNA
  ncRNA 1..20: ncRNA_class = sgRNA
ccgctcctctgaatctaaca

SEQ ID NO: 1541 - RNA, 20 nt, synthetic construct
  source 1..20: mol_type = other RNA
  ncRNA 1..20: ncRNA_class = sgRNA
tctacttgtccctcagtacc

SEQ ID NO: 1542 - RNA, 20 nt, synthetic construct
  source 1..20: mol_type = other RNA
  ncRNA 1..20: ncRNA_class = sgRNA
gaggagtgtgaggtgaccac

SEQ ID NO: 1543 - RNA, 20 nt, synthetic construct
  source 1..20: mol_type = other RNA
  ncRNA 1..20: ncRNA_class = sgRNA
aaggacacagcagtggtatt

SEQ ID NO: 1544 - RNA, 20 nt, synthetic construct
  source 1..20: mol_type = other RNA
  ncRNA 1..20: ncRNA_class = sgRNA
taacaagggctgggtagact

SEQ ID NO: 1545 - RNA, 20 nt, synthetic construct
  source 1..20: mol_type = other RNA
  ncRNA 1..20: ncRNA_class = sgRNA
ctctgaatctaacaagggct

SEQ ID NO: 1546 - RNA, 20 nt, synthetic construct
  source 1..20: mol_type = other RNA
  ncRNA 1..20: ncRNA_class = sgRNA
gcttttggtccaggtactga

SEQ ID NO: 1547 - RNA, 20 nt, synthetic construct
  source 1..20: mol_type = other RNA
  ncRNA 1..20: ncRNA_class = sgRNA
tttcactgatgtaagtgttg

SEQ ID NO: 1548 - RNA, 20 nt, synthetic construct
  source 1..20: mol_type = other RNA
  ncRNA 1..20: ncRNA_class = sgRNA
atcattggacctgttcaaaa

SEQ ID NO: 1549 - RNA, 20 nt, synthetic construct
  source 1..20: mol_type = other RNA
  ncRNA 1..20: ncRNA_class = sgRNA
ccagcccttgttagattcag

SEQ ID NO: 1550 - RNA, 20 nt, synthetic construct
  source 1..20: mol_type = other RNA
  ncRNA 1..20: ncRNA_class = sgRNA
ctgtttgaagtactgttgcc

SEQ ID NO: 1551 - RNA, 20 nt, synthetic construct
  source 1..20: mol_type = other RNA
  ncRNA 1..20: ncRNA_class = sgRNA
gatcatatttcacaatcctg

SEQ ID NO: 1552 - RNA, 20 nt, synthetic construct
  source 1..20: mol_type = other RNA
  ncRNA 1..20: ncRNA_class = sgRNA
ggacacagcagtggtattgg

SEQ ID NO: 1553 - RNA, 20 nt, synthetic construct
  source 1..20: mol_type = other RNA
  ncRNA 1..20: ncRNA_class = sgRNA
tcatcactgctagaaatgct

SEQ ID NO: 1554 - RNA, 20 nt, synthetic construct
  source 1..20: mol_type = other RNA
  ncRNA 1..20: ncRNA_class = sgRNA
tttcacaatcctgtggatct

SEQ ID NO: 1555 - RNA, 20 nt, synthetic construct
  source 1..20: mol_type = other RNA
  ncRNA 1..20: ncRNA_class = sgRNA
tttgaaggatctggaacatt

SEQ ID NO: 1556 - RNA, 20 nt, synthetic construct
  source 1..20: mol_type = other RNA
  ncRNA 1..20: ncRNA_class = sgRNA
tccagaagatctgaaatcat

SEQ ID NO: 1557 - RNA, 20 nt, synthetic construct
  source 1..20: mol_type = other RNA
  ncRNA 1..20: ncRNA_class = sgRNA
caattagtagatcatgtaga

SEQ ID NO: 1558 - RNA, 20 nt, synthetic construct
  source 1..20: mol_type = other RNA
  ncRNA 1..20: ncRNA_class = sgRNA
gtagaaagatttgaaacagt

SEQ ID NO: 1559 - RNA, 20 nt, synthetic construct
  source 1..20: mol_type = other RNA
  ncRNA 1..20: ncRNA_class = sgRNA
aaagatcaaatgtattcaga

SEQ ID NO: 1560 - RNA, 20 nt, synthetic construct
  source 1..20: mol_type = other RNA
  ncRNA 1..20: ncRNA_class = sgRNA
aaaatgtgaaatatctggac

SEQ ID NO: 1561 - RNA, 20 nt, synthetic construct
  source 1..20: mol_type = other RNA
  ncRNA 1..20: ncRNA_class = sgRNA
gcagcagatgcttttggtcc

SEQ ID NO: 1562 - RNA, 20 nt, synthetic construct
  source 1..20: mol_type = other RNA
  ncRNA 1..20: ncRNA_class = sgRNA
aatactgaaggacacagcag

SEQ ID NO: 1563 - RNA, 20 nt, synthetic construct
  source 1..20: mol_type = other RNA
  ncRNA 1..20: ncRNA_class = sgRNA
gaaggacacagcagtggtat

SEQ ID NO: 1564 - RNA, 20 nt, synthetic construct
  source 1..20: mol_type = other RNA
  ncRNA 1..20: ncRNA_class = sgRNA
ccttgttagattcagaggag

SEQ ID NO: 1565 - RNA, 20 nt, synthetic construct
  source 1..20: mol_type = other RNA
  ncRNA 1..20: ncRNA_class = sgRNA
tgggcaaatgaaaatgtttc

SEQ ID NO: 1566 - RNA, 20 nt, synthetic construct
  source 1..20: mol_type = other RNA
  ncRNA 1..20: ncRNA_class = sgRNA
tgcttttggtccaggtactg

SEQ ID NO: 1567 - RNA, 20 nt, synthetic construct
  source 1..20: mol_type = other RNA
  ncRNA 1..20: ncRNA_class = sgRNA
ttcctattgacaactcttct

SEQ ID NO: 1568 - RNA, 20 nt, synthetic construct
  source 1..20: mol_type = other RNA
  ncRNA 1..20: ncRNA_class = sgRNA
atatgactctttgaaggatc

SEQ ID NO: 1569 - RNA, 20 nt, synthetic construct
  source 1..20: mol_type = other RNA
  ncRNA 1..20: ncRNA_class = sgRNA
cctctgaatctaacaagggc

SEQ ID NO: 1570 - RNA, 20 nt, synthetic construct
  source 1..20: mol_type = other RNA
  ncRNA 1..20: ncRNA_class = sgRNA
gatttcagatcttctggaaa

SEQ ID NO: 1571 - RNA, 20 nt, synthetic construct
  source 1..20: mol_type = other RNA
  ncRNA 1..20: ncRNA_class = sgRNA
tccaatgatttcagatcttc

SEQ ID NO: 1572 - RNA, 20 nt, synthetic construct
  source 1..20: mol_type = other RNA
  ncRNA 1..20: ncRNA_class = sgRNA
gatcatgtagatggcggtga

SEQ ID NO: 1573 - RNA, 20 nt, synthetic construct
  source 1..20: mol_type = other RNA
  ncRNA 1..20: ncRNA_class = sgRNA
attcctattgacaactcttc

SEQ ID NO: 1574 - RNA, 20 nt, synthetic construct
  source 1..20: mol_type = other RNA
  ncRNA 1..20: ncRNA_class = sgRNA
tctactaattgtagatcttc

SEQ ID NO: 1575 - RNA, 20 nt, synthetic construct
  source 1..20: mol_type = other RNA
  ncRNA 1..20: ncRNA_class = sgRNA
tttcatttgcccagatccac

SEQ ID NO: 1576 - RNA, 20 nt, synthetic construct
  source 1..20: mol_type = other RNA
  ncRNA 1..20: ncRNA_class = sgRNA
atttcacaatcctgtggatc

SEQ ID NO: 1577 - RNA, 20 nt, synthetic construct
  source 1..20: mol_type = other RNA
  ncRNA 1..20: ncRNA_class = sgRNA
gtttctgcagcagatgcttt

SEQ ID NO: 1578 - RNA, 20 nt, synthetic construct
  source 1..20: mol_type = other RNA
  ncRNA 1..20: ncRNA_class = sgRNA
cttcatgcatgtcatcttct

SEQ ID NO: 1579 - RNA, 20 nt, synthetic construct
  source 1..20: mol_type = other RNA
  ncRNA 1..20: ncRNA_class = sgRNA
ctgtagccttgagtatggga

SEQ ID NO: 1580 - RNA, 20 nt, synthetic construct
  source 1..20: mol_type = other RNA
  ncRNA 1..20: ncRNA_class = sgRNA
agttctgtagccttgagtat

SEQ ID NO: 1581 - RNA, 20 nt, synthetic construct
  source 1..20: mol_type = other RNA
  ncRNA 1..20: ncRNA_class = sgRNA
acagaactgtacaactcgtg

SEQ ID NO: 1582 - RNA, 20 nt, synthetic construct
  source 1..20: mol_type = other RNA
  ncRNA 1..20: ncRNA_class = sgRNA
aactgtacaactcgtgtgga

SEQ ID NO: 1583 - RNA, 20 nt, synthetic construct
  source 1..20: mol_type = other RNA
  ncRNA 1..20: ncRNA_class = sgRNA
atgaagtgactctcacaaga

SEQ ID NO: 1584 - RNA, 20 nt, synthetic construct
  source 1..20: mol_type = other RNA
  ncRNA 1..20: ncRNA_class = sgRNA
atgctttaagatccattaca

SEQ ID NO: 1585 - RNA, 20 nt, synthetic construct
  source 1..20: mol_type = other RNA
  ncRNA 1..20: ncRNA_class = sgRNA
gggtggaatggactactcca

SEQ ID NO: 1586 - RNA, 20 nt, synthetic construct
  source 1..20: mol_type = other RNA
  ncRNA 1..20: ncRNA_class = sgRNA
ggtggaatggactactccaa

SEQ ID NO: 1587 - RNA, 20 nt, synthetic construct
  source 1..20: mol_type = other RNA
  ncRNA 1..20: ncRNA_class = sgRNA
tgttgccagtctgtgataca

SEQ ID NO: 1588 - RNA, 20 nt, synthetic construct
  source 1..20: mol_type = other RNA
  ncRNA 1..20: ncRNA_class = sgRNA
aagcaccctgtatcacagac

SEQ ID NO: 1589 - RNA, 20 nt, synthetic construct
  source 1..20: mol_type = other RNA
  ncRNA 1..20: ncRNA_class = sgRNA
tcttaaataggtgcgatgca

SEQ ID NO: 1590 - RNA, 20 nt, synthetic construct
  source 1..20: mol_type = other RNA
  ncRNA 1..20: ncRNA_class = sgRNA
gtgcatcgcacctatttaag

SEQ ID NO: 1591 - RNA, 20 nt, synthetic construct
  source 1..20: mol_type = other RNA
  ncRNA 1..20: ncRNA_class = sgRNA
aggaagccctgaatccataa

SEQ ID NO: 1592 - RNA, 20 nt, synthetic construct
  source 1..20: mol_type = other RNA
  ncRNA 1..20: ncRNA_class = sgRNA
cgaacagtaggtcctttgga

SEQ ID NO: 1593 - RNA, 20 nt, synthetic construct
  source 1..20: mol_type = other RNA
  ncRNA 1..20: ncRNA_class = sgRNA
cttccaaaggacctactgtt

SEQ ID NO: 1594 - RNA, 20 nt, synthetic construct
  source 1..20: mol_type = other RNA
  ncRNA 1..20: ncRNA_class = sgRNA
ggacaatgtatattctgtgt

SEQ ID NO: 1595 - RNA, 20 nt, synthetic construct
  source 1..20: mol_type = other RNA
  ncRNA 1..20: ncRNA_class = sgRNA
aggacaatgtatattctgtg

SEQ ID NO: 1596 - RNA, 20 nt, synthetic construct
  source 1..20: mol_type = other RNA
  ncRNA 1..20: ncRNA_class = sgRNA
caatgtgtcactagtcaaag

SEQ ID NO: 1597 - RNA, 20 nt, synthetic construct
  source 1..20: mol_type = other RNA
  ncRNA 1..20: ncRNA_class = sgRNA
gactagtgacacattgtaca

SEQ ID NO: 1598 - RNA, 20 nt, synthetic construct
  source 1..20: mol_type = other RNA
  ncRNA 1..20: ncRNA_class = sgRNA
taagcaaacaggcacgacta

SEQ ID NO: 1599 - RNA, 20 nt, synthetic construct
  source 1..20: mol_type = other RNA
  ncRNA 1..20: ncRNA_class = sgRNA
actgttcggacaaaaaaagt

SEQ ID NO: 1600 - RNA, 20 nt, synthetic construct
  source 1..20: mol_type = other RNA
  ncRNA 1..20: ncRNA_class = sgRNA
cagcatacacagatgaaggt

SEQ ID NO: 1601 - RNA, 20 nt, synthetic construct
  source 1..20: mol_type = other RNA
  ncRNA 1..20: ncRNA_class = sgRNA
aataggaatgctaagcaaac

SEQ ID NO: 1602 - RNA, 20 nt, synthetic construct
  source 1..20: mol_type = other RNA
  ncRNA 1..20: ncRNA_class = sgRNA
cagttctgtagccttgagta

SEQ ID NO: 1603 - RNA, 20 nt, synthetic construct
  source 1..20: mol_type = other RNA
  ncRNA 1..20: ncRNA_class = sgRNA
tttccattggcttcaaaagg

SEQ ID NO: 1604 - RNA, 20 nt, synthetic construct
  source 1..20: mol_type = other RNA
  ncRNA 1..20: ncRNA_class = sgRNA
caaagataacatgctttggg

SEQ ID NO: 1605 - RNA, 20 nt, synthetic construct
  source 1..20: mol_type = other RNA
  ncRNA 1..20: ncRNA_class = sgRNA
ctgttcggacaaaaaaagta

SEQ ID NO: 1606 - RNA, 20 nt, synthetic construct
  source 1..20: mol_type = other RNA
  ncRNA 1..20: ncRNA_class = sgRNA
aaacgaagctgtcttagagt

SEQ ID NO: 1607 - RNA, 20 nt, synthetic construct
  source 1..20: mol_type = other RNA
  ncRNA 1..20: ncRNA_class = sgRNA
cacattgtacatggtacgaa

SEQ ID NO: 1608 - RNA, 20 nt, synthetic construct
  source 1..20: mol_type = other RNA
  ncRNA 1..20: ncRNA_class = sgRNA
atggcagcatacacagatga

SEQ ID NO: 1609 - RNA, 20 nt, synthetic construct
  source 1..20: mol_type = other RNA
  ncRNA 1..20: ncRNA_class = sgRNA
ggggtagtaaaagtgaattc

SEQ ID NO: 1610 - RNA, 20 nt, synthetic construct
  source 1..20: mol_type = other RNA
  ncRNA 1..20: ncRNA_class = sgRNA
ttgcctccttttgaagccaa

SEQ ID NO: 1611 - RNA, 20 nt, synthetic construct
  source 1..20: mol_type = other RNA
  ncRNA 1..20: ncRNA_class = sgRNA
cctggtccatcagcatatac

SEQ ID NO: 1612 - RNA, 20 nt, synthetic construct
  source 1..20: mol_type = other RNA
  ncRNA 1..20: ncRNA_class = sgRNA
ggtatgcctttatggattca

SEQ ID NO: 1613 - RNA, 20 nt, synthetic construct
  source 1..20: mol_type = other RNA
  ncRNA 1..20: ncRNA_class = sgRNA
aaaacgaagctgtcttagag

SEQ ID NO: 1614 - RNA, 20 nt, synthetic construct
  source 1..20: mol_type = other RNA
  ncRNA 1..20: ncRNA_class = sgRNA
ttgttgccagtctgtgatac

SEQ ID NO: 1615 - RNA, 20 nt, synthetic construct
  source 1..20: mol_type = other RNA
  ncRNA 1..20: ncRNA_class = sgRNA
tctgaacatcaacaggaagt

SEQ ID NO: 1616 - RNA, 20 nt, synthetic construct
  source 1..20: mol_type = other RNA
  ncRNA 1..20: ncRNA_class = sgRNA
cttcctgttgatgttcagaa

SEQ ID NO: 1617 - RNA, 20 nt, synthetic construct
  source 1..20: mol_type = other RNA
  ncRNA 1..20: ncRNA_class = sgRNA
gcagcatacacagatgaagg

SEQ ID NO: 1618 - RNA, 20 nt, synthetic construct
  source 1..20: mol_type = other RNA
  ncRNA 1..20: ncRNA_class = sgRNA
acttttactaccccaaagtt

SEQ ID NO: 1619 - RNA, 20 nt, synthetic construct
  source 1..20: mol_type = other RNA
  ncRNA 1..20: ncRNA_class = sgRNA
aatgctttaagatccattac

SEQ ID NO: 1620 - RNA, 20 nt, synthetic construct
  source 1..20: mol_type = other RNA
  ncRNA 1..20: ncRNA_class = sgRNA
taaagaaatatatacttgag

SEQ ID NO: 1621 - RNA, 20 nt, synthetic construct
  source 1..20: mol_type = other RNA
  ncRNA 1..20: ncRNA_class = sgRNA
ccagtatatgctgatggacc

SEQ ID NO: 1622 - RNA, 20 nt, synthetic construct
  source 1..20: mol_type = other RNA
  ncRNA 1..20: ncRNA_class = sgRNA
gagatttactgtcagttttg

SEQ ID NO: 1623 - RNA, 20 nt, synthetic construct
  source 1..20: mol_type = other RNA
  ncRNA 1..20: ncRNA_class = sgRNA
cccaaagcatgttatctttg

SEQ ID NO: 1624 - RNA, 20 nt, synthetic construct
  source 1..20: mol_type = other RNA
  ncRNA 1..20: ncRNA_class = sgRNA
tccccaaagataacatgctt

SEQ ID NO: 1625 - RNA, 20 nt, synthetic construct
  source 1..20: mol_type = other RNA
  ncRNA 1..20: ncRNA_class = sgRNA
aggtatgcctttatggattc

SEQ ID NO: 1626 - RNA, 20 nt, synthetic construct
  source 1..20: mol_type = other RNA
  ncRNA 1..20: ncRNA_class = sgRNA
tctattttataccagaaact

SEQ ID NO: 1627 - RNA, 20 nt, synthetic construct
  source 1..20: mol_type = other RNA
  ncRNA 1..20: ncRNA_class = sgRNA
tgtccgaacagtaggtcctt

SEQ ID NO: 1628 - RNA, 20 nt, synthetic construct
  source 1..20: mol_type = other RNA
  ncRNA 1..20: ncRNA_class = sgRNA
cagaaacttggtgctttaga

SEQ ID NO: 1629 - RNA, 20 nt, synthetic construct
  source 1..20: mol_type = other RNA
  ncRNA 1..20: ncRNA_class = sgRNA
catctaaagcaccaagtttc

SEQ ID NO: 1630 - RNA, 20 nt, synthetic construct
  source 1..20: mol_type = other RNA
  ncRNA 1..20: ncRNA_class = sgRNA
tgaagccaatggaaaaatct

SEQ ID NO: 1631 - RNA, 20 nt, synthetic construct
  source 1..20: mol_type = other RNA
  ncRNA 1..20: ncRNA_class = sgRNA
ctaacagtaagaaatcttgt

SEQ ID NO: 1632 - RNA, 20 nt, synthetic construct
  source 1..20: mol_type = other RNA
  ncRNA 1..20: ncRNA_class = sgRNA
cacccaaagcatgttatctt

SEQ ID NO: 1633 - RNA, 20 nt, synthetic construct
  source 1..20: mol_type = other RNA
  ncRNA 1..20: ncRNA_class = sgRNA
ccccaaagataacatgcttt

SEQ ID NO: 1634 - RNA, 20 nt, synthetic construct
  source 1..20: mol_type = other RNA
  ncRNA 1..20: ncRNA_class = sgRNA
tatttctttacagattccct

SEQ ID NO: 1635 - RNA, 20 nt, synthetic construct
  source 1..20: mol_type = other RNA
  ncRNA 1..20: ncRNA_class = sgRNA
ttgtttaaggtatgccttta

SEQ ID NO: 1636 - RNA, 20 nt, synthetic construct
  source 1..20: mol_type = other RNA
  ncRNA 1..20: ncRNA_class = sgRNA
actttttttgtccgaacagt

SEQ ID NO: 1637 - RNA, 20 nt, synthetic construct
  source 1..20: mol_type = other RNA
  ncRNA 1..20: ncRNA_class = sgRNA
accagtttcatttccaatga

SEQ ID NO: 1638 - RNA, 20 nt, synthetic construct
  source 1..20: mol_type = other RNA
  ncRNA 1..20: ncRNA_class = sgRNA
atacacagatgaaggtggga

SEQ ID NO: 1639 - RNA, 20 nt, synthetic construct
  source 1..20: mol_type = other RNA
  ncRNA 1..20: ncRNA_class = sgRNA
atccctgcctgtgactttca

SEQ ID NO: 1640 - RNA, 20 nt, synthetic construct
  source 1..20: mol_type = other RNA
  ncRNA 1..20: ncRNA_class = sgRNA
tttatggattcagggcttcc

SEQ ID NO: 1641 - RNA, 20 nt, synthetic construct
  source 1..20: mol_type = other RNA
  ncRNA 1..20: ncRNA_class = sgRNA
ataacatgctttgggtggaa

SEQ ID NO: 1642 - RNA, 20 nt, synthetic construct
  source 1..20: mol_type = other RNA
  ncRNA 1..20: ncRNA_class = sgRNA
ctcccagaagagttgtcaat

SEQ ID NO: 1643 - RNA, 20 nt, synthetic construct
  source 1..20: mol_type = other RNA
  ncRNA 1..20: ncRNA_class = sgRNA
caacaagatttcttactgtt

SEQ ID NO: 1644 - RNA, 20 nt, synthetic construct
  source 1..20: mol_type = other RNA
  ncRNA 1..20: ncRNA_class = sgRNA
acagactggcaacaagaaga

SEQ ID NO: 1645 - RNA, 20 nt, synthetic construct
  source 1..20: mol_type = other RNA
  ncRNA 1..20: ncRNA_class = sgRNA
gttactccagtatatgctga

SEQ ID NO: 1646 - RNA, 20 nt, synthetic construct
  source 1..20: mol_type = other RNA
  ncRNA 1..20: ncRNA_class = sgRNA
atagatccatcccatactca

SEQ ID NO: 1647 - RNA, 20 nt, synthetic construct
  source 1..20: mol_type = other RNA
  ncRNA 1..20: ncRNA_class = sgRNA
acccaaagcatgttatcttt

SEQ ID NO: 1648 - RNA, 20 nt, synthetic construct
  source 1..20: mol_type = other RNA
  ncRNA 1..20: ncRNA_class = sgRNA
atttttccattggcttcaaa

SEQ ID NO: 1649 - RNA, 20 nt, synthetic construct
  source 1..20: mol_type = other RNA
  ncRNA 1..20: ncRNA_class = sgRNA
aacaagatttcttactgtta

SEQ ID NO: 1650 - RNA, 20 nt, synthetic construct
  source 1..20: mol_type = other RNA
  ncRNA 1..20: ncRNA_class = sgRNA
atattttatagaaccatcat

SEQ ID NO: 1651 - RNA, 20 nt, synthetic construct
  source 1..20: mol_type = other RNA
  ncRNA 1..20: ncRNA_class = sgRNA
accatcattggaaatgaaac

SEQ ID NO: 1652 - RNA, 20 nt, synthetic construct
  source 1..20: mol_type = other RNA
  ncRNA 1..20: ncRNA_class = sgRNA
aatccattctgaacatcaac

SEQ ID NO: 1653 - RNA, 20 nt, synthetic construct
  source 1..20: mol_type = other RNA
  ncRNA 1..20: ncRNA_class = sgRNA
gaactactagtccttcactg

SEQ ID NO: 1654 - RNA, 20 nt, synthetic construct
  source 1..20: mol_type = other RNA
  ncRNA 1..20: ncRNA_class = sgRNA
gcggctacatgcctcagtga

SEQ ID NO: 1655 - RNA, 20 nt, synthetic construct
  source 1..20: mol_type = other RNA
  ncRNA 1..20: ncRNA_class = sgRNA
ttggtgggaatatacccctc

SEQ ID NO: 1656 - RNA, 20 nt, synthetic construct
  source 1..20: mol_type = other RNA
  ncRNA 1..20: ncRNA_class = sgRNA
tggtgggaatatacccctca

SEQ ID NO: 1657 - RNA, 20 nt, synthetic construct
  source 1..20: mol_type = other RNA
  ncRNA 1..20: ncRNA_class = sgRNA
ggtgggaatatacccctcag

SEQ ID NO: 1658 - RNA, 20 nt, synthetic construct
  source 1..20: mol_type = other RNA
  ncRNA 1..20: ncRNA_class = sgRNA
ccagtccaataacccctgag

SEQ ID NO: 1659 - RNA, 20 nt, synthetic construct
  source 1..20: mol_type = other RNA
  ncRNA 1..20: ncRNA_class = sgRNA
gaccagtccaataacccctg

SEQ ID NO: 1660 - RNA, 20 nt, synthetic construct
  source 1..20: mol_type = other RNA
  ncRNA 1..20: ncRNA_class = sgRNA
tggactggtccctcacctag

SEQ ID NO: 1661 - RNA, 20 nt, synthetic construct
  source 1..20: mol_type = other RNA
  ncRNA 1..20: ncRNA_class = sgRNA
tgctgtaccaagtgccacaa

SEQ ID NO: 1662 - RNA, 20 nt, synthetic construct
  source 1..20: mol_type = other RNA
  ncRNA 1..20: ncRNA_class = sgRNA
tggacagtcattgtacaagt

SEQ ID NO: 1663 - RNA, 20 nt, synthetic construct
  source 1..20: mol_type = other RNA
  ncRNA 1..20: ncRNA_class = sgRNA
acaatgactgtccaggcccg

SEQ ID NO: 1664 - RNA, 20 nt, synthetic construct
  source 1..20: mol_type = other RNA
  ncRNA 1..20: ncRNA_class = sgRNA
ggggcaggatacggactgca

SEQ ID NO: 1665 - RNA, 20 nt, synthetic construct
  source 1..20: mol_type = other RNA
  ncRNA 1..20: ncRNA_class = sgRNA
cagctgctccaaatgccgaa

SEQ ID NO: 1666 - RNA, 20 nt, synthetic construct
  source 1..20: mol_type = other RNA
  ncRNA 1..20: ncRNA_class = sgRNA
ggagatctcttcttgcacag

SEQ ID NO: 1667 - RNA, 20 nt, synthetic construct
  source 1..20: mol_type = other RNA
  ncRNA 1..20: ncRNA_class = sgRNA
gtggaccgggacaccgtgtg

SEQ ID NO: 1668 - RNA, 20 nt, synthetic construct
  source 1..20: mol_type = other RNA
  ncRNA 1..20: ncRNA_class = sgRNA
agaggtgcacggtcccattg

SEQ ID NO: 1669 - RNA, 20 nt, synthetic construct
  source 1..20: mol_type = other RNA
  ncRNA 1..20: ncRNA_class = sgRNA
tgcagccacacacggtgtcc

SEQ ID NO: 1670 - RNA, 20 nt, synthetic construct
  source 1..20: mol_type = other RNA
  ncRNA 1..20: ncRNA_class = sgRNA
accagtccaataacccctga

SEQ ID NO: 1671 - RNA, 20 nt, synthetic construct
  source 1..20: mol_type = other RNA
  ncRNA 1..20: ncRNA_class = sgRNA
tacttgtacaatgactgtcc

SEQ ID NO: 1672 - RNA, 20 nt, synthetic construct
  source 1..20: mol_type = other RNA
  ncRNA 1..20: ncRNA_class = sgRNA
gttcttcctgcagccacaca

SEQ ID NO: 1673 - RNA, 20 nt, synthetic construct
  source 1..20: mol_type = other RNA
  ncRNA 1..20: ncRNA_class = sgRNA
agctgctccaaatgccgaaa

SEQ ID NO: 1674 - RNA, 20 nt, synthetic construct
  source 1..20: mol_type = other RNA
  ncRNA 1..20: ncRNA_class = sgRNA
tctccctgtcccctaggtga

SEQ ID NO: 1675 - RNA, 20 nt, synthetic construct
  source 1..20: mol_type = other RNA
  ncRNA 1..20: ncRNA_class = sgRNA
tgcagtccgtatcctgcccc

SEQ ID NO: 1676 - RNA, 20 nt, synthetic construct
  source 1..20: mol_type = other RNA
  ncRNA 1..20: ncRNA_class = sgRNA
attggactggtccctcacct

SEQ ID NO: 1677 - RNA, 20 nt, synthetic construct
  source 1..20: mol_type = other RNA
  ncRNA 1..20: ncRNA_class = sgRNA
agagatagtgtgtgtcccca

SEQ ID NO: 1678 - RNA, 20 nt, synthetic construct
  source 1..20: mol_type = other RNA
  ncRNA 1..20: ncRNA_class = sgRNA
gtggttttctgaagcggtga

SEQ ID NO: 1679 - RNA, 20 nt, synthetic construct
  source 1..20: mol_type = other RNA
  ncRNA 1..20: ncRNA_class = sgRNA
gtgctcctggagctgttggt

SEQ ID NO: 1680 - RNA, 20 nt, synthetic construct
  source 1..20: mol_type = other RNA
  ncRNA 1..20: ncRNA_class = sgRNA
ttggactggtccctcaccta

SEQ ID NO: 1681 - RNA, 20 nt, synthetic construct
  source 1..20: mol_type = other RNA
  ncRNA 1..20: ncRNA_class = sgRNA
gactgcagggagtgtgagag

SEQ ID NO: 1682 - RNA, 20 nt, synthetic construct
  source 1..20: mol_type = other RNA
  ncRNA 1..20: ncRNA_class = sgRNA
tggtccctcacctaggggac

SEQ ID NO: 1683 - RNA, 20 nt, synthetic construct
  source 1..20: mol_type = other RNA
  ncRNA 1..20: ncRNA_class = sgRNA
ctgcagtccgtatcctgccc

SEQ ID NO: 1684 - RNA, 20 nt, synthetic construct
  source 1..20: mol_type = other RNA
  ncRNA 1..20: ncRNA_class = sgRNA
cagcaaatcgaattattttg

SEQ ID NO: 1685 - RNA, 20 nt, synthetic construct
  source 1..20: mol_type = other RNA
  ncRNA 1..20: ncRNA_class = sgRNA
gcaggtcaggcacggtggag

SEQ ID NO: 1686 - RNA, 20 nt, synthetic construct
  source 1..20: mol_type = other RNA
  ncRNA 1..20: ncRNA_class = sgRNA
cggggcaggatacggactgc

SEQ ID NO: 1687 - RNA, 20 nt, synthetic construct
  source 1..20: mol_type = other RNA
  ncRNA 1..20: ncRNA_class = sgRNA
tctcttcttgcacagtggac

SEQ ID NO: 1688 - RNA, 20 nt, synthetic construct
  source 1..20: mol_type = other RNA
  ncRNA 1..20: ncRNA_class = sgRNA
gtacaatgactgtccaggcc

SEQ ID NO: 1689 - RNA, 20 nt, synthetic construct
  source 1..20: mol_type = other RNA
  ncRNA 1..20: ncRNA_class = sgRNA
ttctccctgtcccctaggtg

SEQ ID NO: 1690 - RNA, 20 nt, synthetic construct
  source 1..20: mol_type = other RNA
  ncRNA 1..20: ncRNA_class = sgRNA
gggtggatatattttccttg

SEQ ID NO: 1691 - RNA, 20 nt, synthetic construct
  source 1..20: mol_type = other RNA
  ncRNA 1..20: ncRNA_class = sgRNA
agaggctgcaattgaagcac

SEQ ID NO: 1692 - RNA, 20 nt, synthetic construct
  source 1..20: mol_type = other RNA
  ncRNA 1..20: ncRNA_class = sgRNA
ggttttcactccaataatgc

SEQ ID NO: 1693 - RNA, 20 nt, synthetic construct
  source 1..20: mol_type = other RNA
  ncRNA 1..20: ncRNA_class = sgRNA
cccctcaggggttattggac

SEQ ID NO: 1694 - RNA, 20 nt, synthetic construct
  source 1..20: mol_type = other RNA
  ncRNA 1..20: ncRNA_class = sgRNA
tacaatgactgtccaggccc

SEQ ID NO: 1695 - RNA, 20 nt, synthetic construct
  source 1..20: mol_type = other RNA
  ncRNA 1..20: ncRNA_class = sgRNA
atatacccctcaggggttat

SEQ ID NO: 1696 - RNA, 20 nt, synthetic construct
  source 1..20: mol_type = other RNA
  ncRNA 1..20: ncRNA_class = sgRNA
gctgcaggaagaaccagtac

SEQ ID NO: 1697 - RNA, 20 nt, synthetic construct
  source 1..20: mol_type = other RNA
  ncRNA 1..20: ncRNA_class = sgRNA
agctgaggcagtgtctgagg

SEQ ID NO: 1698 - RNA, 20 nt, synthetic construct
  source 1..20: mol_type = other RNA
  ncRNA 1..20: ncRNA_class = sgRNA
aaatcgaattattttgaggg

SEQ ID NO: 1699 - RNA, 20 nt, synthetic construct
  source 1..20: mol_type = other RNA
  ncRNA 1..20: ncRNA_class = sgRNA
agggtggatatattttcctt

SEQ ID NO: 1700 - RNA, 20 nt, synthetic construct
  source 1..20: mol_type = other RNA
  ncRNA 1..20: ncRNA_class = sgRNA
gagggtggatatattttcct

SEQ ID NO: 1701 - RNA, 20 nt, synthetic construct
  source 1..20: mol_type = other RNA
  ncRNA 1..20: ncRNA_class = sgRNA
tccgtatcctgccccgggcc

SEQ ID NO: 1702 - RNA, 20 nt, synthetic construct
  source 1..20: mol_type = other RNA
  ncRNA 1..20: ncRNA_class = sgRNA
ggtccctcacctaggggaca

SEQ ID NO: 1703 - RNA, 20 nt, synthetic construct
  source 1..20: mol_type = other RNA
  ncRNA 1..20: ncRNA_class = sgRNA
tccaggcccggggcaggata

SEQ ID NO: 1704 - RNA, 20 nt, synthetic construct
  source 1..20: mol_type = other RNA
  ncRNA 1..20: ncRNA_class = sgRNA
acacggtgttctgtttctcc

SEQ ID NO: 1705 - RNA, 20 nt, synthetic construct
  source 1..20: mol_type = other RNA
  ncRNA 1..20: ncRNA_class = sgRNA
tgactgtccaggcccggggc

SEQ ID NO: 1706 - RNA, 20 nt, synthetic construct
  source 1..20: mol_type = other RNA
  ncRNA 1..20: ncRNA_class = sgRNA
tggcagcagcaggtcaggca

SEQ ID NO: 1707 - RNA, 20 nt, synthetic construct
  source 1..20: mol_type = other RNA
  ncRNA 1..20: ncRNA_class = sgRNA
ctcttcttgcacagtggacc

SEQ ID NO: 1708 - RNA, 20 nt, synthetic construct
  source 1..20: mol_type = other RNA
  ncRNA 1..20: ncRNA_class = sgRNA
agaaccagtaccggcattat

SEQ ID NO: 1709 - RNA, 20 nt, synthetic construct
  source 1..20: mol_type = other RNA
  ncRNA 1..20: ncRNA_class = sgRNA
gcacggtcccattgaggcag

SEQ ID NO: 1710 - RNA, 20 nt, synthetic construct
  source 1..20: mol_type = other RNA
  ncRNA 1..20: ncRNA_class = sgRNA
cactccaataatgccggtac

SEQ ID NO: 1711 - RNA, 20 nt, synthetic construct
  source 1..20: mol_type = other RNA
  ncRNA 1..20: ncRNA_class = sgRNA
agcaaatcgaattattttga

SEQ ID NO: 1712 - RNA, 20 nt, synthetic construct
  source 1..20: mol_type = other RNA
  ncRNA 1..20: ncRNA_class = sgRNA
gggacaccgtgtgtggctgc

SEQ ID NO: 1713 - RNA, 20 nt, synthetic construct
  source 1..20: mol_type = other RNA
  ncRNA 1..20: ncRNA_class = sgRNA
ttcggcatttggagcagctg

SEQ ID NO: 1714 - RNA, 20 nt, synthetic construct
  source 1..20: mol_type = other RNA
  ncRNA 1..20: ncRNA_class = sgRNA
agcagctgaggcagtgtctg

SEQ ID NO: 1715 - RNA, 20 nt, synthetic construct
  source 1..20: mol_type = other RNA
  ncRNA 1..20: ncRNA_class = sgRNA
ctctcttctccctgtcccct

SEQ ID NO: 1716 - RNA, 20 nt, synthetic construct
  source 1..20: mol_type = other RNA
  ncRNA 1..20: ncRNA_class = sgRNA
cagcagcaggtcaggcacgg

SEQ ID NO: 1717 - RNA, 20 nt, synthetic construct
  source 1..20: mol_type = other RNA
  ncRNA 1..20: ncRNA_class = sgRNA
tgcaattgaagcactggaaa

SEQ ID NO: 1718 - RNA, 20 nt, synthetic construct
  source 1..20: mol_type = other RNA
  ncRNA 1..20: ncRNA_class = sgRNA
atattcccaccaacagctcc

SEQ ID NO: 1719 - RNA, 20 nt, synthetic construct
  source 1..20: mol_type = other RNA
  ncRNA 1..20: ncRNA_class = sgRNA
accgtgtgcacctgccatgc

SEQ ID NO: 1720 - RNA, 20 nt, synthetic construct
  source 1..20: mol_type = other RNA
  ncRNA 1..20: ncRNA_class = sgRNA
tagaaagaaacctgcatggc

SEQ ID NO: 1721 - RNA, 20 nt, synthetic construct
  source 1..20: mol_type = other RNA
  ncRNA 1..20: ncRNA_class = sgRNA
ctcttagaaagaaacctgca

SEQ ID NO: 1722 - RNA, 20 nt, synthetic construct
  source 1..20: mol_type = other RNA
  ncRNA 1..20: ncRNA_class = sgRNA
acctgcatggcaggtgcaca

SEQ ID NO: 1723 - RNA, 20 nt, synthetic construct
  source 1..20: mol_type = other RNA
  ncRNA 1..20: ncRNA_class = sgRNA
ggcacaacttcgtgcactcc

SEQ ID NO: 1724 - RNA, 20 nt, synthetic construct
  source 1..20: mol_type = other RNA
  ncRNA 1..20: ncRNA_class = sgRNA
gtttaatgtatcgctaccaa

SEQ ID NO: 1725 - RNA, 20 nt, synthetic construct
  source 1..20: mol_type = other RNA
  ncRNA 1..20: ncRNA_class = sgRNA
taatgtatcgctaccaacgg

SEQ ID NO: 1726 - RNA, 20 nt, synthetic construct
  source 1..20: mol_type = other RNA
  ncRNA 1..20: ncRNA_class = sgRNA
agagcttggacttccaccgt

SEQ ID NO: 1727 - RNA, 20 nt, synthetic construct
  source 1..20: mol_type = other RNA
  ncRNA 1..20: ncRNA_class = sgRNA
aggaactactactaagcccc

SEQ ID NO: 1728 - RNA, 20 nt, synthetic construct
  source 1..20: mol_type = other RNA
  ncRNA 1..20: ncRNA_class = sgRNA
aaagttgggacagtcaccgg

SEQ ID NO: 1729 - RNA, 20 nt, synthetic construct
  source 1..20: mol_type = other RNA
  ncRNA 1..20: ncRNA_class = sgRNA
caaagttgggacagtcaccg

SEQ ID NO: 1730 - RNA, 20 nt, synthetic construct
  source 1..20: mol_type = other RNA
  ncRNA 1..20: ncRNA_class = sgRNA
ctgcggggagccgcaaagtt

SEQ ID NO: 1731 - RNA, 20 nt, synthetic construct
  source 1..20: mol_type = other RNA
  ncRNA 1..20: ncRNA_class = sgRNA
cggtgactgtcccaactttg

SEQ ID NO: 1732 - RNA, 20 nt, synthetic construct
  source 1..20: mol_type = other RNA
  ncRNA 1..20: ncRNA_class = sgRNA
ggtggtgccacctctctgcg

SEQ ID NO: 1733 - RNA, 20 nt, synthetic construct
  source 1..20: mol_type = other RNA
  ncRNA 1..20: ncRNA_class = sgRNA
ctttgcggctccccgcagag

SEQ ID NO: 1734 - RNA, 20 nt, synthetic construct
  source 1..20: mol_type = other RNA
  ncRNA 1..20: ncRNA_class = sgRNA
gggtcagccccctgataggg

SEQ ID NO: 1735 - RNA, 20 nt, synthetic construct
  source 1..20: mol_type = other RNA
  ncRNA 1..20: ncRNA_class = sgRNA
aggtggcaccaccctatcag

SEQ ID NO: 1736 - RNA, 20 nt, synthetic construct
  source 1..20: mol_type = other RNA
  ncRNA 1..20: ncRNA_class = sgRNA
ggtggcaccaccctatcagg

SEQ ID NO: 1737 - RNA, 20 nt, synthetic construct
  source 1..20: mol_type = other RNA
  ncRNA 1..20: ncRNA_class = sgRNA
ccacggcgtacagcgtcgcg

SEQ ID NO: 1738 - RNA, 20 nt, synthetic construct
  source 1..20: mol_type = other RNA
  ncRNA 1..20: ncRNA_class = sgRNA
cgcgacgctgtacgccgtgg

SEQ ID NO: 1739 - RNA, 20 nt, synthetic construct
  source 1..20: mol_type = other RNA
  ncRNA 1..20: ncRNA_class = sgRNA
cgggggcacgttctccacca

SEQ ID NO: 1740 - RNA, 20 nt, synthetic construct
  source 1..20: mol_type = other RNA
  ncRNA 1..20: ncRNA_class = sgRNA
aattccttccagcgcaacgg

SEQ ID NO: 1741 - RNA, 20 nt, synthetic construct
  source 1..20: mol_type = other RNA
  ncRNA 1..20: ncRNA_class = sgRNA
gaattccttccagcgcaacg

SEQ ID NO: 1742 - RNA, 20 nt, synthetic construct
  source 1..20: mol_type = other RNA
  ncRNA 1..20: ncRNA_class = sgRNA
acgaattccttccagcgcaa

SEQ ID NO: 1743 - RNA, 20 nt, synthetic construct
  source 1..20: mol_type = other RNA
  ncRNA 1..20: ncRNA_class = sgRNA
cgtgcccccgttgcgctgga

SEQ ID NO: 1744 - RNA, 20 nt, synthetic construct
  source 1..20: mol_type = other RNA
  ncRNA 1..20: ncRNA_class = sgRNA
tgcgctggaaggaattcgtg

SEQ ID NO: 1745 - RNA, 20 nt, synthetic construct
  source 1..20: mol_type = other RNA
  ncRNA 1..20: ncRNA_class = sgRNA
tgagcgaccacgagatcgat

SEQ ID NO: 1746 - RNA, 20 nt, synthetic construct
  source 1..20: mol_type = other RNA
  ncRNA 1..20: ncRNA_class = sgRNA
aatacagcatgctggcgacc

SEQ ID NO: 1747 - RNA, 20 nt, synthetic construct
  source 1..20: mol_type = other RNA
  ncRNA 1..20: ncRNA_class = sgRNA
acagcatgctggcgacctgg

SEQ ID NO: 1748 - RNA, 20 nt, synthetic construct
  source 1..20: mol_type = other RNA
  ncRNA 1..20: ncRNA_class = sgRNA
tccagcgtggcctcgcgccg

SEQ ID NO: 1749 - RNA, 20 nt, synthetic construct
  source 1..20: mol_type = other RNA
  ncRNA 1..20: ncRNA_class = sgRNA
gggcacgggactgaagccca

SEQ ID NO: 1750 - RNA, 20 nt, synthetic construct
  source 1..20: mol_type = other RNA
  ncRNA 1..20: ncRNA_class = sgRNA
agggtggtgccacctctctg

SEQ ID NO: 1751 - RNA, 20 nt, synthetic construct
  source 1..20: mol_type = other RNA
  ncRNA 1..20: ncRNA_class = sgRNA
cgagggctgtcgcaaggatg

SEQ ID NO: 1752 - RNA, 20 nt, synthetic construct
  source 1..20: mol_type = other RNA
  ncRNA 1..20: ncRNA_class = sgRNA
gaggtggcaccaccctatca

SEQ ID NO: 1753 - RNA, 20 nt, synthetic construct
  source 1..20: mol_type = other RNA
  ncRNA 1..20: ncRNA_class = sgRNA
aagtccaagctctactccat

SEQ ID NO: 1754 - RNA, 20 nt, synthetic construct
  source 1..20: mol_type = other RNA
  ncRNA 1..20: ncRNA_class = sgRNA
gaaatcgacacctgaaaaag

SEQ ID NO: 1755 - RNA, 20 nt, synthetic construct
  source 1..20: mol_type = other RNA
  ncRNA 1..20: ncRNA_class = sgRNA
cgaggcgcaatacagcatgc

SEQ ID NO: 1756 - RNA, 20 nt, synthetic construct
  source 1..20: mol_type = other RNA
  ncRNA 1..20: ncRNA_class = sgRNA
accacggcgtacagcgtcgc

SEQ ID NO: 1757 - RNA, 20 nt, synthetic construct
  source 1..20: mol_type = other RNA
  ncRNA 1..20: ncRNA_class = sgRNA
caccacggcgtacagcgtcg

SEQ ID NO: 1758 - RNA, 20 nt, synthetic construct
  source 1..20: mol_type = other RNA
  ncRNA 1..20: ncRNA_class = sgRNA
gaacgggcgctgcctgcgcg

SEQ ID NO: 1759 - RNA, 20 nt, synthetic construct
  source 1..20: mol_type = other RNA
  ncRNA 1..20: ncRNA_class = sgRNA
gcgagggctgtcgcaaggat

SEQ ID NO: 1760 - RNA, 20 nt, synthetic construct
  source 1..20: mol_type = other RNA
  ncRNA 1..20: ncRNA_class = sgRNA
ctcaccaatggagtagagct

SEQ ID NO: 1761 - RNA, 20 nt, synthetic construct
  source 1..20: mol_type = other RNA
  ncRNA 1..20: ncRNA_class = sgRNA
acagtcaccgggggtatagg

SEQ ID NO: 1762 - RNA, 20 nt, synthetic construct
  source 1..20: mol_type = other RNA
  ncRNA 1..20: ncRNA_class = sgRNA
tgtcctcccacttctgaagg

SEQ ID NO: 1763 - RNA, 20 nt, synthetic construct
  source 1..20: mol_type = other RNA
  ncRNA 1..20: ncRNA_class = sgRNA
tccagctccacctatacccc

SEQ ID NO: 1764 - RNA, 20 nt, synthetic construct
  source 1..20: mol_type = other RNA
  ncRNA 1..20: ncRNA_class = sgRNA
caacccccttcagaagtggg

SEQ ID NO: 1765 - RNA, 20 nt, synthetic construct
  source 1..20: mol_type = other RNA
  ncRNA 1..20: ncRNA_class = sgRNA
aggaattcgtgcggcgccta

SEQ ID NO: 1766 - RNA, 20 nt, synthetic construct
  source 1..20: mol_type = other RNA
  ncRNA 1..20: ncRNA_class = sgRNA
tgctgtattgcgcctcgcgc

SEQ ID NO: 1767 - RNA, 20 nt, synthetic construct
  source 1..20: mol_type = other RNA
  ncRNA 1..20: ncRNA_class = sgRNA
ctccgcgacatggacctgct

SEQ ID NO: 1768 - RNA, 20 nt, synthetic construct
  source 1..20: mol_type = other RNA
  ncRNA 1..20: ncRNA_class = sgRNA
tctgcggggagccgcaaagt

SEQ ID NO: 1769 - RNA, 20 nt, synthetic construct
  source 1..20: mol_type = other RNA
  ncRNA 1..20: ncRNA_class = sgRNA
ggcgagggctgtcgcaagga

SEQ ID NO: 1770 - RNA, 20 nt, synthetic construct
  source 1..20: mol_type = other RNA
  ncRNA 1..20: ncRNA_class = sgRNA
ccccgcgacgctgtacgccg

SEQ ID NO: 1771 - RNA, 20 nt, synthetic construct
  source 1..20: mol_type = other RNA
  ncRNA 1..20: ncRNA_class = sgRNA
agaacgtgcccccgttgcgc

SEQ ID NO: 1772 - RNA, 20 nt, synthetic construct
  source 1..20: mol_type = other RNA
  ncRNA 1..20: ncRNA_class = sgRNA
gtctaggctctgtggcttgt

SEQ ID NO: 1773 - RNA, 20 nt, synthetic construct
  source 1..20: mol_type = other RNA
  ncRNA 1..20: ncRNA_class = sgRNA
gcggcgcacgccgcggcgcg

SEQ ID NO: 1774 - RNA, 20 nt, synthetic construct
  source 1..20: mol_type = other RNA
  ncRNA 1..20: ncRNA_class = sgRNA
cggaggcgagggctgtcgca

SEQ ID NO: 1775 - RNA, 20 nt, synthetic construct
  source 1..20: mol_type = other RNA
  ncRNA 1..20: ncRNA_class = sgRNA
gatcggctggagctgcagaa

SEQ ID NO: 1776 - RNA, 20 nt, synthetic construct
  source 1..20: mol_type = other RNA
  ncRNA 1..20: ncRNA_class = sgRNA
aagcttgggtttggggccag

SEQ ID NO: 1777 - RNA, 20 nt, synthetic construct
  source 1..20: mol_type = other RNA
  ncRNA 1..20: ncRNA_class = sgRNA
tctcgtggtcgctcagccct

SEQ ID NO: 1778 - RNA, 20 nt, synthetic construct
  source 1..20: mol_type = other RNA
  ncRNA 1..20: ncRNA_class = sgRNA
gctgtcctcccacttctgaa

SEQ ID NO: 1779 - RNA, 20 nt, synthetic construct
  source 1..20: mol_type = other RNA
  ncRNA 1..20: ncRNA_class = sgRNA
gcgtcccagcagctccagcg

SEQ ID NO: 1780 - RNA, 20 nt, synthetic construct
  source 1..20: mol_type = other RNA
  ncRNA 1..20: ncRNA_class = sgRNA
atcggctggagctgcagaac

SEQ ID NO: 1781 - RNA, 20 nt, synthetic construct
  source 1..20: mol_type = other RNA
  ncRNA 1..20: ncRNA_class = sgRNA
cgcaaagttgggacagtcac

SEQ ID NO: 1782 - RNA, 20 nt, synthetic construct
  source 1..20: mol_type = other RNA
  ncRNA 1..20: ncRNA_class = sgRNA
tgtctaggctctgtggcttg

SEQ ID NO: 1783 - RNA, 20 nt, synthetic construct
  source 1..20: mol_type = other RNA
  ncRNA 1..20: ncRNA_class = sgRNA
atggggtcagccccctgata

SEQ ID NO: 1784 - RNA, 20 nt, synthetic construct
  source 1..20: mol_type = other RNA
  ncRNA 1..20: ncRNA_class = sgRNA
agcccagcaggtccatgtcg

SEQ ID NO: 1785 - RNA, 20 nt, synthetic construct
  source 1..20: mol_type = other RNA
  ncRNA 1..20: ncRNA_class = sgRNA
gctccagccgatcgatctcg

SEQ ID NO: 1786 - RNA, 20 nt, synthetic construct
  source 1..20: mol_type = other RNA
  ncRNA 1..20: ncRNA_class = sgRNA
cgaccacgagatcgatcggc

SEQ ID NO: 1787 - RNA, 20 nt, synthetic construct
  source 1..20: mol_type = other RNA
  ncRNA 1..20: ncRNA_class = sgRNA
gggacagtcaccgggggtat

SEQ ID NO: 1788 - RNA, 20 nt, synthetic construct
  source 1..20: mol_type = other RNA
  ncRNA 1..20: ncRNA_class = sgRNA
gggctgcctggaggacatcg

SEQ ID NO: 1789 - RNA, 20 nt, synthetic construct
  source 1..20: mol_type = other RNA
  ncRNA 1..20: ncRNA_class = sgRNA
ctggagtgggactgaagctt

SEQ ID NO: 1790 - RNA, 20 nt, synthetic construct
  source 1..20: mol_type = other RNA
  ncRNA 1..20: ncRNA_class = sgRNA
gccgcggcgcgaggccacgc

SEQ ID NO: 1791 - RNA, 20 nt, synthetic construct
  source 1..20: mol_type = other RNA
  ncRNA 1..20: ncRNA_class = sgRNA
gggacgcgtgctccgcgaca

SEQ ID NO: 1792 - RNA, 20 nt, synthetic construct
  source 1..20: mol_type = other RNA
  ncRNA 1..20: ncRNA_class = sgRNA
cattaaaccaatgaagagga

SEQ ID NO: 1793 - RNA, 20 nt, synthetic construct
  source 1..20: mol_type = other RNA
  ncRNA 1..20: ncRNA_class = sgRNA
gatggggtcagccccctgat

SEQ ID NO: 1794 - RNA, 20 nt, synthetic construct
  source 1..20: mol_type = other RNA
  ncRNA 1..20: ncRNA_class = sgRNA
gtgaaggtggaactgggcac

SEQ ID NO: 1795 - RNA, 20 nt, synthetic construct
  source 1..20: mol_type = other RNA
  ncRNA 1..20: ncRNA_class = sgRNA
ctgtcctcccacttctgaag

SEQ ID NO: 1796 - RNA, 20 nt, synthetic construct
  source 1..20: mol_type = other RNA
  ncRNA 1..20: ncRNA_class = sgRNA
gatacattaaaccaatgaag

SEQ ID NO: 1797 - RNA, 20 nt, synthetic construct
  source 1..20: mol_type = other RNA
  ncRNA 1..20: ncRNA_class = sgRNA
acattaaaccaatgaagagg

SEQ ID NO: 1798 - RNA, 20 nt, synthetic construct
  source 1..20: mol_type = other RNA
  ncRNA 1..20: ncRNA_class = sgRNA
cgaattccttccagcgcaac

SEQ ID NO: 1799 - RNA, 20 nt, synthetic construct
  source 1..20: mol_type = other RNA
  ncRNA 1..20: ncRNA_class = sgRNA
acgggactgaagcccagggt

SEQ ID NO: 1800 - RNA, 20 nt, synthetic construct
  source 1..20: mol_type = other RNA
  ncRNA 1..20: ncRNA_class = sgRNA
gggtggtgccacctctctgc

SEQ ID NO: 1801 - RNA, 20 nt, synthetic construct
  source 1..20: mol_type = other RNA
  ncRNA 1..20: ncRNA_class = sgRNA
gggactgaagcttgggtttg

SEQ ID NO: 1802 - RNA, 20 nt, synthetic construct
  source 1..20: mol_type = other RNA
  ncRNA 1..20: ncRNA_class = sgRNA
gcaaagttgggacagtcacc

SEQ ID NO: 1803 - RNA, 20 nt, synthetic construct
  source 1..20: mol_type = other RNA
  ncRNA 1..20: ncRNA_class = sgRNA
cctggagtgggactgaagct

SEQ ID NO: 1804 - RNA, 20 nt, synthetic construct
  source 1..20: mol_type = other RNA
  ncRNA 1..20: ncRNA_class = sgRNA
gtgggggtgaagcctggagt

SEQ ID NO: 1805 - RNA, 20 nt, synthetic construct
  source 1..20: mol_type = other RNA
  ncRNA 1..20: ncRNA_class = sgRNA
ggacctgctgggctgcctgg

SEQ ID NO: 1806 - RNA, 20 nt, synthetic construct
  source 1..20: mol_type = other RNA
  ncRNA 1..20: ncRNA_class = sgRNA
gaggccacgctggagctgct

SEQ ID NO: 1807 - RNA, 20 nt, synthetic construct
  source 1..20: mol_type = other RNA
  ncRNA 1..20: ncRNA_class = sgRNA
cctggaggcggcgcacgccg

SEQ ID NO: 1808 - RNA, 20 nt, synthetic construct
  source 1..20: mol_type = other RNA
  ncRNA 1..20: ncRNA_class = sgRNA
cacgggactgaagcccaggg

SEQ ID NO: 1809 - RNA, 20 nt, synthetic construct
  source 1..20: mol_type = other RNA
  ncRNA 1..20: ncRNA_class = sgRNA
tgggcacgggactgaagccc

SEQ ID NO: 1810 - RNA, 20 nt, synthetic construct
  source 1..20: mol_type = other RNA
  ncRNA 1..20: ncRNA_class = sgRNA
tgcggctccccgcagagagg

SEQ ID NO: 1811 - RNA, 20 nt, synthetic construct
  source 1..20: mol_type = other RNA
  ncRNA 1..20: ncRNA_class = sgRNA
gtgggactgaagcttgggtt

SEQ ID NO: 1812 - RNA, 20 nt, synthetic construct
  source 1..20: mol_type = other RNA
  ncRNA 1..20: ncRNA_class = sgRNA
cccacttctgaagggggttg

SEQ ID NO: 1813 - RNA, 20 nt, synthetic construct
  source 1..20: mol_type = other RNA
  ncRNA 1..20: ncRNA_class = sgRNA
gcatgctggcgacctggagg

SEQ ID NO: 1814 - RNA, 20 nt, synthetic construct
  source 1..20: mol_type = other RNA
  ncRNA 1..20: ncRNA_class = sgRNA
ctgcctggaggacatcgagg

SEQ ID NO: 1815 - RNA, 20 nt, synthetic construct
  source 1..20: mol_type = other RNA
  ncRNA 1..20: ncRNA_class = sgRNA
tcccacttctgaagggggtt

SEQ ID NO: 1816 - RNA, 20 nt, synthetic construct
  source 1..20: mol_type = other RNA
  ncRNA 1..20: ncRNA_class = sgRNA
ccccaacccccttcagaagt

SEQ ID NO: 1817 - RNA, 20 nt, synthetic construct
  source 1..20: mol_type = other RNA
  ncRNA 1..20: ncRNA_class = sgRNA
ggggatggggtcggaggcga

SEQ ID NO: 1818 - RNA, 20 nt, synthetic construct
  source 1..20: mol_type = other RNA
  ncRNA 1..20: ncRNA_class = sgRNA
agaggtggcaccaccctatc

SEQ ID NO: 1819 - RNA, 20 nt, synthetic construct
  source 1..20: mol_type = other RNA
  ncRNA 1..20: ncRNA_class = sgRNA
aaggaattcgtgcggcgcct

SEQ ID NO: 1820 - RNA, 20 nt, synthetic construct
  source 1..20: mol_type = other RNA
  ncRNA 1..20: ncRNA_class = sgRNA
ctcccacttctgaagggggt

SEQ ID NO: 1821 - RNA, 20 nt, synthetic construct
  source 1..20: mol_type = other RNA
  ncRNA 1..20: ncRNA_class = sgRNA
cgctgtcctcccacttctga

SEQ ID NO: 1822 - RNA, 20 nt, synthetic construct
  source 1..20: mol_type = other RNA
  ncRNA 1..20: ncRNA_class = sgRNA
cgggactgaagcccagggtg

SEQ ID NO: 1823 - RNA, 20 nt, synthetic construct
  source 1..20: mol_type = other RNA
  ncRNA 1..20: ncRNA_class = sgRNA
cttttatccctcctcttcat

SEQ ID NO: 1824 - RNA, 20 nt, synthetic construct
  source 1..20: mol_type = other RNA
  ncRNA 1..20: ncRNA_class = sgRNA
ggtgaaggtggaactgggca

SEQ ID NO: 1825 - RNA, 20 nt, synthetic construct
  source 1..20: mol_type = other RNA
  ncRNA 1..20: ncRNA_class = sgRNA
tgggactgaagcttgggttt

SEQ ID NO: 1826 - RNA, 20 nt, synthetic construct
  source 1..20: mol_type = other RNA
  ncRNA 1..20: ncRNA_class = sgRNA
ccaagcttcagtcccactcc

SEQ ID NO: 1827 - RNA, 20 nt, synthetic construct
  source 1..20: mol_type = other RNA
  ncRNA 1..20: ncRNA_class = sgRNA
caatgaagaggagggataaa

SEQ ID NO: 1828 - RNA, 20 nt, synthetic construct
  source 1..20: mol_type = other RNA
  ncRNA 1..20: ncRNA_class = sgRNA
tgtcctccaggcagcccagc

SEQ ID NO: 1829 - RNA, 20 nt, synthetic construct
  source 1..20: mol_type = other RNA
  ncRNA 1..20: ncRNA_class = sgRNA
catggacctgctgggctgcc

SEQ ID NO: 1830 - RNA, 20 nt, synthetic construct
  source 1..20: mol_type = other RNA
  ncRNA 1..20: ncRNA_class = sgRNA
tccccaacccccttcagaag

SEQ ID NO: 1831 - RNA, 20 nt, synthetic construct
  source 1..20: mol_type = other RNA
  ncRNA 1..20: ncRNA_class = sgRNA
ccgcggcgtgcgccgcctcc

SEQ ID NO: 1832 - RNA, 20 nt, synthetic construct
  source 1..20: mol_type = other RNA
  ncRNA 1..20: ncRNA_class = sgRNA
accgggggtataggtggagc

SEQ ID NO: 1833 - RNA, 20 nt, synthetic construct
  source 1..20: mol_type = other RNA
  ncRNA 1..20: ncRNA_class = sgRNA
cccagggtgggggtgaagcc

SEQ ID NO: 1834 - RNA, 20 nt, synthetic construct
  source 1..20: mol_type = other RNA
  ncRNA 1..20: ncRNA_class = sgRNA
tccaggcttcacccccaccc

SEQ ID NO: 1835 - RNA, 20 nt, synthetic construct
  source 1..20: mol_type = other RNA
  ncRNA 1..20: ncRNA_class = sgRNA
gctccgcgacatggacctgc

SEQ ID NO: 1836 - RNA, 20 nt, synthetic construct
  source 1..20: mol_type = other RNA
  ncRNA 1..20: ncRNA_class = sgRNA
gaagcttgggtttggggcca

SEQ ID NO: 1837 - RNA, 20 nt, synthetic construct
  source 1..20: mol_type = other RNA
  ncRNA 1..20: ncRNA_class = sgRNA
ccaggcttcacccccaccct

SEQ ID NO: 1838 - RNA, 20 nt, synthetic construct
  source 1..20: mol_type = other RNA
  ncRNA 1..20: ncRNA_class = sgRNA
gcgcctcctcgatgtcctcc

SEQ ID NO: 1839 - RNA, 20 nt, synthetic construct
  source 1..20: mol_type = other RNA
  ncRNA 1..20: ncRNA_class = sgRNA
ttctgaagggggttggggat

SEQ ID NO: 1840 - RNA, 20 nt, synthetic construct
  source 1..20: mol_type = other RNA
  ncRNA 1..20: ncRNA_class = sgRNA
tgaagcttgggtttggggcc

SEQ ID NO: 1841 - RNA, 20 nt, synthetic construct
  source 1..20: mol_type = other RNA
  ncRNA 1..20: ncRNA_class = sgRNA
tggggatggggtcggaggcg

SEQ ID NO: 1842 - RNA, 20 nt, synthetic construct
  source 1..20: mol_type = other RNA
  ncRNA 1..20: ncRNA_class = sgRNA
ggggttggggatggggtcgg

SEQ ID NO: 1843 - RNA, 20 nt, synthetic construct
  source 1..20: mol_type = other RNA
  ncRNA 1..20: ncRNA_class = sgRNA
cttctgaagggggttgggga

SEQ ID NO: 1844 - RNA, 20 nt, synthetic construct
  source 1..20: mol_type = other RNA
  ncRNA 1..20: ncRNA_class = sgRNA
cgaggccacgctggagctgc

SEQ ID NO: 1845 - RNA, 20 nt, synthetic construct
  source 1..20: mol_type = other RNA
  ncRNA 1..20: ncRNA_class = sgRNA
gggggtataggtggagctgg

SEQ ID NO: 1846 - RNA, 20 nt, synthetic construct
  source 1..20: mol_type = other RNA
  ncRNA 1..20: ncRNA_class = sgRNA
gaccaggggcaacagcactg

SEQ ID NO: 1847 - RNA, 20 nt, synthetic construct
  source 1..20: mol_type = other RNA
  ncRNA 1..20: ncRNA_class = sgRNA
tgagaatgttaagggcactg

SEQ ID NO: 1848 - RNA, 20 nt, synthetic construct
  source 1..20: mol_type = other RNA
  ncRNA 1..20: ncRNA_class = sgRNA
cccttaacattctcaatctg

SEQ ID NO: 1849 - RNA, 20 nt, synthetic construct
  source 1..20: mol_type = other RNA
  ncRNA 1..20: ncRNA_class = sgRNA
gttaagggcactgaggactc

SEQ ID NO: 1850 - RNA, 20 nt, synthetic construct
  source 1..20: mol_type = other RNA
  ncRNA 1..20: ncRNA_class = sgRNA
aagaccaaagaaaatgacca

SEQ ID NO: 1851 - RNA, 20 nt, synthetic construct
  source 1..20: mol_type = other RNA
  ncRNA 1..20: ncRNA_class = sgRNA
ccccagattgagaatgttaa

SEQ ID NO: 1852 - RNA, 20 nt, synthetic construct
  source 1..20: mol_type = other RNA
  ncRNA 1..20: ncRNA_class = sgRNA
agaccaaagaaaatgaccag

SEQ ID NO: 1853 - RNA, 20 nt, synthetic construct
  source 1..20: mol_type = other RNA
  ncRNA 1..20: ncRNA_class = sgRNA
taacattctcaatctggggt

SEQ ID NO: 1854 - RNA, 20 nt, synthetic construct
  source 1..20: mol_type = other RNA
  ncRNA 1..20: ncRNA_class = sgRNA
ttgcccctggtcattttctt

SEQ ID NO: 1855 - RNA, 20 nt, synthetic construct
  source 1..20: mol_type = other RNA
  ncRNA 1..20: ncRNA_class = sgRNA
gcccttaacattctcaatct

SEQ ID NO: 1856 - RNA, 20 nt, synthetic construct
  source 1..20: mol_type = other RNA
  ncRNA 1..20: ncRNA_class = sgRNA
accccagattgagaatgtta

SEQ ID NO: 1857 - RNA, 20 nt, synthetic construct
  source 1..20: mol_type = other RNA
  ncRNA 1..20: ncRNA_class = sgRNA
caccacagtgctgttgcccc

SEQ ID NO: 1858 - RNA, 20 nt, synthetic construct
  source 1..20: mol_type = other RNA
  ncRNA 1..20: ncRNA_class = sgRNA
aaagaccaaagaaaatgacc

SEQ ID NO: 1859 - RNA, 20 nt, synthetic construct
  source 1..20: mol_type = other RNA
  ncRNA 1..20: ncRNA_class = sgRNA
tgcccttaacattctcaatc

SEQ ID NO: 1860 - RNA, 20 nt, synthetic construct
  source 1..20: mol_type = other RNA
  ncRNA 1..20: ncRNA_class = sgRNA
gacatcgaggaggcgctttg

SEQ ID NO: 1861 - RNA, 20 nt, synthetic construct
  source 1..20: mol_type = other RNA
  ncRNA 1..20: ncRNA_class = sgRNA
ctgagaagactgggcgcggg

SEQ ID NO: 1862 - RNA, 20 nt, synthetic construct
  source 1..20: mol_type = other RNA
  ncRNA 1..20: ncRNA_class = sgRNA
catctgagaagactgggcgc

SEQ ID NO: 1863 - RNA, 20 nt, synthetic construct
  source 1..20: mol_type = other RNA
  ncRNA 1..20: ncRNA_class = sgRNA
tcatctgagaagactgggcg

SEQ ID NO: 1864 - RNA, 20 nt, synthetic construct
  source 1..20: mol_type = other RNA
  ncRNA 1..20: ncRNA_class = sgRNA
aagactgggcgcgggcggga

SEQ ID NO: 1865 - RNA, 20 nt, synthetic construct
  source 1..20: mol_type = other RNA
  ncRNA 1..20: ncRNA_class = sgRNA
cagcctcatctgagaagact

SEQ ID NO: 1866 - RNA, 20 nt, synthetic construct
  source 1..20: mol_type = other RNA
  ncRNA 1..20: ncRNA_class = sgRNA
gaagactgggcgcgggcggg

SEQ ID NO: 1867 - RNA, 20 nt, synthetic construct
  source 1..20: mol_type = other RNA
  ncRNA 1..20: ncRNA_class = sgRNA
tgagaagactgggcgcgggc

SEQ ID NO: 1868 - RNA, 20 nt, synthetic construct
  source 1..20: mol_type = other RNA
  ncRNA 1..20: ncRNA_class = sgRNA
gcagcctcatctgagaagac

SEQ ID NO: 1869 - RNA, 20 nt, synthetic construct
  source 1..20: mol_type = other RNA
  ncRNA 1..20: ncRNA_class = sgRNA
gcgcgggcgggagggcggcg

SEQ ID NO: 1870 - RNA, 20 nt, synthetic construct
  source 1..20: mol_type = other RNA
  ncRNA 1..20: ncRNA_class = sgRNA
gggcgcgggcgggagggcgg

SEQ ID NO: 1871 - RNA, 20 nt, synthetic construct
  source 1..20: mol_type = other RNA
  ncRNA 1..20: ncRNA_class = sgRNA
ggcgcgggcgggagggcggc

SEQ ID NO: 1872 - RNA, 20 nt, synthetic construct
  source 1..20: mol_type = other RNA
  ncRNA 1..20: ncRNA_class = sgRNA
ctccagtccgacggccagcg

SEQ ID NO: 1873 - RNA, 20 nt, synthetic construct
  source 1..20: mol_type = other RNA
  ncRNA 1..20: ncRNA_class = sgRNA
ctcccgggctccggggcgta

SEQ ID NO: 1874 - RNA, 20 nt, synthetic construct
  source 1..20: mol_type = other RNA
  ncRNA 1..20: ncRNA_class = sgRNA
ggcatttacaccctacgccc

SEQ ID NO: 1875 - RNA, 20 nt, synthetic construct
  source 1..20: mol_type = other RNA
  ncRNA 1..20: ncRNA_class = sgRNA
gcatgtgctcccgggctccg

SEQ ID NO: 1876 - RNA, 20 nt, synthetic construct
  source 1..20: mol_type = other RNA
  ncRNA 1..20: ncRNA_class = sgRNA
ctgagccggcatgtgctccc

SEQ ID NO: 1877 - RNA, 20 nt, synthetic construct
  source 1..20: mol_type = other RNA
  ncRNA 1..20: ncRNA_class = sgRNA
gtgctgcagcaaatgctcgc

SEQ ID NO: 1878 - RNA, 20 nt, synthetic construct
  source 1..20: mol_type = other RNA
  ncRNA 1..20: ncRNA_class = sgRNA
ggagtcacacacggtgtccg

SEQ ID NO: 1879 - RNA, 20 nt, synthetic construct
  source 1..20: mol_type = other RNA
  ncRNA 1..20: ncRNA_class = sgRNA
gtcctcacaggagtcacaca

SEQ ID NO: 1880 - RNA, 20 nt, synthetic construct
  source 1..20: mol_type = other RNA
  ncRNA 1..20: ncRNA_class = sgRNA
caccgtgtgtgactcctgtg

SEQ ID NO: 1881 - RNA, 20 nt, synthetic construct
  source 1..20: mol_type = other RNA
  ncRNA 1..20: ncRNA_class = sgRNA
ggtgtatgtgctgtcctcac

SEQ ID NO: 1882 - RNA, 20 nt, synthetic construct
  source 1..20: mol_type = other RNA
  ncRNA 1..20: ncRNA_class = sgRNA
gggaacccagttccagagct

SEQ ID NO: 1883 - RNA, 20 nt, synthetic construct
  source 1..20: mol_type = other RNA
  ncRNA 1..20: ncRNA_class = sgRNA
ggaaactcaagcctgcactc

SEQ ID NO: 1884 - RNA, 20 nt, synthetic construct
  source 1..20: mol_type = other RNA
  ncRNA 1..20: ncRNA_class = sgRNA
gcggttctgttcccgagtgc

SEQ ID NO: 1885 - RNA, 20 nt, synthetic construct
  source 1..20: mol_type = other RNA
  ncRNA 1..20: ncRNA_class = sgRNA
gtactgcgcgctgagcaagc

SEQ ID NO: 1886 - RNA, 20 nt, synthetic construct
  source 1..20: mol_type = other RNA
  ncRNA 1..20: ncRNA_class = sgRNA
tgcgcgctgagcaagcagga

SEQ ID NO: 1887 - RNA, 20 nt, synthetic construct
  source 1..20: mol_type = other RNA
  ncRNA 1..20: ncRNA_class = sgRNA
cccgggcggcacttgcgcag

SEQ ID NO: 1888 - RNA, 20 nt, synthetic construct
  source 1..20: mol_type = other RNA
  ncRNA 1..20: ncRNA_class = sgRNA
cggagcccgggagcacatgc

SEQ ID NO: 1889 - RNA, 20 nt, synthetic construct
  source 1..20: mol_type = other RNA
  ncRNA 1..20: ncRNA_class = sgRNA
agtcttctgtaccaagacct

SEQ ID NO: 1890 - RNA, 20 nt, synthetic construct
  source 1..20: mol_type = other RNA
  ncRNA 1..20: ncRNA_class = sgRNA
ggtcatagtattctctgagc

SEQ ID NO: 1891 - RNA, 20 nt, synthetic construct
  source 1..20: mol_type = other RNA
  ncRNA 1..20: ncRNA_class = sgRNA
tgctgcagcaaatgctcgcc

SEQ ID NO: 1892 - RNA, 20 nt, synthetic construct
  source 1..20: mol_type = other RNA
  ncRNA 1..20: ncRNA_class = sgRNA
acacacggtgtccgaggtct

SEQ ID NO: 1893 - RNA, 20 nt, synthetic construct
  source 1..20: mol_type = other RNA
  ncRNA 1..20: ncRNA_class = sgRNA
ggccgtcggactggagctct

SEQ ID NO: 1894 - RNA, 20 nt, synthetic construct
  source 1..20: mol_type = other RNA
  ncRNA 1..20: ncRNA_class = sgRNA
ggagccacagctcaagcact

SEQ ID NO: 1895 - RNA, 20 nt, synthetic construct
  source 1..20: mol_type = other RNA
  ncRNA 1..20: ncRNA_class = sgRNA
ctgcgcgctgagcaagcagg

SEQ ID NO: 1896 - RNA, 20 nt, synthetic construct
  source 1..20: mol_type = other RNA
  ncRNA 1..20: ncRNA_class = sgRNA
cggactggagctctgggctg

SEQ ID NO: 1897 - RNA, 20 nt, synthetic construct
  source 1..20: mol_type = other RNA
  ncRNA 1..20: ncRNA_class = sgRNA
tggaaactcaagcctgcact

SEQ ID NO: 1898 - RNA, 20 nt, synthetic construct
  source 1..20: mol_type = other RNA
  ncRNA 1..20: ncRNA_class = sgRNA
gttcccgagtgcttgagctg

SEQ ID NO: 1899 - RNA, 20 nt, synthetic construct
  source 1..20: mol_type = other RNA
  ncRNA 1..20: ncRNA_class = sgRNA
caccctacgccccggagccc

SEQ ID NO: 1900 - RNA, 20 nt, synthetic construct
  source 1..20: mol_type = other RNA
  ncRNA 1..20: ncRNA_class = sgRNA
cgggaacccagttccagagc

SEQ ID NO: 1901 - RNA, 20 nt, synthetic construct
  source 1..20: mol_type = other RNA
  ncRNA 1..20: ncRNA_class = sgRNA
tgcagcacatctgagctgtc

SEQ ID NO: 1902 - RNA, 20 nt, synthetic construct
  source 1..20: mol_type = other RNA
  ncRNA 1..20: ncRNA_class = sgRNA
acagcacatacacccagctc

SEQ ID NO: 1903 - RNA, 20 nt, synthetic construct
  source 1..20: mol_type = other RNA
  ncRNA 1..20: ncRNA_class = sgRNA
ctcagcgcgcagtaccagcc

SEQ ID NO: 1904 - RNA, 20 nt, synthetic construct
  source 1..20: mol_type = other RNA
  ncRNA 1..20: ncRNA_class = sgRNA
acaccctacgccccggagcc

SEQ ID NO: 1905 - RNA, 20 nt, synthetic construct
  source 1..20: mol_type = other RNA
  ncRNA 1..20: ncRNA_class = sgRNA
agcccagagctccagtccga

SEQ ID NO: 1906 - RNA, 20 nt, synthetic construct
  source 1..20: mol_type = other RNA
  ncRNA 1..20: ncRNA_class = sgRNA
cggcatgtgctcccgggctc

SEQ ID NO: 1907 - RNA, 20 nt, synthetic construct
  source 1..20: mol_type = other RNA
  ncRNA 1..20: ncRNA_class = sgRNA
gcgcgctgagcaagcaggag

SEQ ID NO: 1908 - RNA, 20 nt, synthetic construct
  source 1..20: mol_type = other RNA
  ncRNA 1..20: ncRNA_class = sgRNA
atacacccagctctggaact

SEQ ID NO: 1909 - RNA, 20 nt, synthetic construct
  source 1..20: mol_type = other RNA
  ncRNA 1..20: ncRNA_class = sgRNA
tacagaagacttttgcatgt

SEQ ID NO: 1910 - RNA, 20 nt, synthetic construct
  source 1..20: mol_type = other RNA
  ncRNA 1..20: ncRNA_class = sgRNA
ggcgcacgccttgcccgccc

SEQ ID NO: 1911 - RNA, 20 nt, synthetic construct
  source 1..20: mol_type = other RNA
  ncRNA 1..20: ncRNA_class = sgRNA
tctgagccggcatgtgctcc

SEQ ID NO: 1912 - RNA, 20 nt, synthetic construct
  source 1..20: mol_type = other RNA
  ncRNA 1..20: ncRNA_class = sgRNA
tgcaggcttgagtttccacc

SEQ ID NO: 1913 - RNA, 20 nt, synthetic construct
  source 1..20: mol_type = other RNA
  ncRNA 1..20: ncRNA_class = sgRNA
gctcagcgcgcagtaccagc

SEQ ID NO: 1914 - RNA, 20 nt, synthetic construct
  source 1..20: mol_type = other RNA
  ncRNA 1..20: ncRNA_class = sgRNA
tgtggctcccgctgtagctc

SEQ ID NO: 1915 - RNA, 20 nt, synthetic construct
  source 1..20: mol_type = other RNA
  ncRNA 1..20: ncRNA_class = sgRNA
gtctgggccgcgctggccgt

SEQ ID NO: 1916 - RNA, 20 nt, synthetic construct
  source 1..20: mol_type = other RNA
  ncRNA 1..20: ncRNA_class = sgRNA
tggccgtcggactggagctc

SEQ ID NO: 1917 - RNA, 20 nt, synthetic construct
  source 1..20: mol_type = other RNA
  ncRNA 1..20: ncRNA_class = sgRNA
tctgcacctgcaggcccggc

SEQ ID NO: 1918 - RNA, 20 nt, synthetic construct
  source 1..20: mol_type = other RNA
  ncRNA 1..20: ncRNA_class = sgRNA
gctcccgggctccggggcgt

SEQ ID NO: 1919 - RNA, 20 nt, synthetic construct
  source 1..20: mol_type = other RNA
  ncRNA 1..20: ncRNA_class = sgRNA
ggcatgtgctcccgggctcc

SEQ ID NO: 1920 - RNA, 20 nt, synthetic construct
  source 1..20: mol_type = other RNA
  ncRNA 1..20: ncRNA_class = sgRNA
agcgcggcccagacggcgac

SEQ ID NO: 1921 - RNA, 20 nt, synthetic construct
  source 1..20: mol_type = other RNA
  ncRNA 1..20: ncRNA_class = sgRNA
tgcgcagcggcgcgcacagc

SEQ ID NO: 1922 - RNA, 20 nt, synthetic construct
  source 1..20: mol_type = other RNA
  ncRNA 1..20: ncRNA_class = sgRNA
ggccgcgctggccgtcggac

SEQ ID NO: 1923 - RNA, 20 nt, synthetic construct
  source 1..20: mol_type = other RNA
  ncRNA 1..20: ncRNA_class = sgRNA
cagcgcggcccagacggcga

SEQ ID NO: 1924 - RNA, 20 nt, synthetic construct
  source 1..20: mol_type = other RNA
  ncRNA 1..20: ncRNA_class = sgRNA
gacggccagcgcggcccaga

SEQ ID NO: 1925 - RNA, 20 nt, synthetic construct
  source 1..20: mol_type = other RNA
  ncRNA 1..20: ncRNA_class = sgRNA
tgagcaagcaggaggggtgc

SEQ ID NO: 1926 - RNA, 20 nt, synthetic construct
  source 1..20: mol_type = other RNA
  ncRNA 1..20: ncRNA_class = sgRNA
cgggcctgcaggtgcagatg

SEQ ID NO: 1927 - RNA, 20 nt, synthetic construct
  source 1..20: mol_type = other RNA
  ncRNA 1..20: ncRNA_class = sgRNA
gcagtaccagccgggcctgc

SEQ ID NO: 1928 - RNA, 20 nt, synthetic construct
  source 1..20: mol_type = other RNA
  ncRNA 1..20: ncRNA_class = sgRNA
agaaccgcatctgcacctgc

SEQ ID NO: 1929 - RNA, 20 nt, synthetic construct
  source 1..20: mol_type = other RNA
  ncRNA 1..20: ncRNA_class = sgRNA
cgcatctgcacctgcaggcc

SEQ ID NO: 1930 - RNA, 20 nt, synthetic construct
  source 1..20: mol_type = other RNA
  ncRNA 1..20: ncRNA_class = sgRNA
cgtcgccgtctgggccgcgc

SEQ ID NO: 1931 - RNA, 20 nt, synthetic construct
  source 1..20: mol_type = other RNA
  ncRNA 1..20: ncRNA_class = sgRNA
catacacccagctctggaac

SEQ ID NO: 1932 - RNA, 20 nt, synthetic construct
  source 1..20: mol_type = other RNA
  ncRNA 1..20: ncRNA_class = sgRNA
ccgctgcgcaagtgccgccc

SEQ ID NO: 1933 - RNA, 20 nt, synthetic construct
  source 1..20: mol_type = other RNA
  ncRNA 1..20: ncRNA_class = sgRNA
tggccacgccgaagcccggg

SEQ ID NO: 1934 - RNA, 20 nt, synthetic construct
  source 1..20: mol_type = other RNA
  ncRNA 1..20: ncRNA_class = sgRNA
aggaactgaaacatcagacg

SEQ ID NO: 1935 - RNA, 20 nt, synthetic construct
  source 1..20: mol_type = other RNA
  ncRNA 1..20: ncRNA_class = sgRNA
gagaacgtccccggggcaca

SEQ ID NO: 1936 - RNA, 20 nt, synthetic construct
  source 1..20: mol_type = other RNA
  ncRNA 1..20: ncRNA_class = sgRNA
tgtgcaagccctgtgccccg

SEQ ID NO: 1937 - RNA, 20 nt, synthetic construct
  source 1..20: mol_type = other RNA
  ncRNA 1..20: ncRNA_class = sgRNA
cgtgttggagaacgtccccg

SEQ ID NO: 1938 - RNA, 20 nt, synthetic construct
  source 1..20: mol_type = other RNA
  ncRNA 1..20: ncRNA_class = sgRNA
gtcgtgttggagaacgtccc

SEQ ID NO: 1939 - RNA, 20 nt, synthetic construct
  source 1..20: mol_type = other RNA
  ncRNA 1..20: ncRNA_class = sgRNA
ctccaacacgacttcatcca

SEQ ID NO: 1940 - RNA, 20 nt, synthetic construct
  source 1..20: mol_type = other RNA
  ncRNA 1..20: ncRNA_class = sgRNA
gtggggcctgcaaatatccg

SEQ ID NO: 1941 - RNA, 20 nt, synthetic construct
  source 1..20: mol_type = other RNA
  ncRNA 1..20: ncRNA_class = sgRNA
gtaacgtggtggccatccct

SEQ ID NO: 1942 - RNA, 20 nt, synthetic construct
  source 1..20: mol_type = other RNA
  ncRNA 1..20: ncRNA_class = sgRNA
catccatgcttgcattccca

SEQ ID NO: 1943 - RNA, 20 nt, synthetic construct
  source 1..20: mol_type = other RNA
  ncRNA 1..20: ncRNA_class = sgRNA
tgtaacgtggtggccatccc

SEQ ID NO: 1944 - RNA, 20 nt, synthetic construct
  source 1..20: mol_type = other RNA
  ncRNA 1..20: ncRNA_class = sgRNA
ggcttcggcgtggccagacc

SEQ ID NO: 1945 - RNA, 20 nt, synthetic construct
  source 1..20: mol_type = other RNA
  ncRNA 1..20: ncRNA_class = sgRNA
tcgtgttggagaacgtcccc

SEQ ID NO: 1946 - RNA, 20 nt, synthetic construct
  source 1..20: mol_type = other RNA
  ncRNA 1..20: ncRNA_class = sgRNA
catccctgggaatgcaagca

SEQ ID NO: 1947 - RNA, 20 nt, synthetic construct
  source 1..20: mol_type = other RNA
  ncRNA 1..20: ncRNA_class = sgRNA
gtctggccacgccgaagccc

SEQ ID NO: 1948 - RNA, 20 nt, synthetic construct
  source 1..20: mol_type = other RNA
  ncRNA 1..20: ncRNA_class = sgRNA
ggtctggccacgccgaagcc

SEQ ID NO: 1949 - RNA, 20 nt, synthetic construct
  source 1..20: mol_type = other RNA
  ncRNA 1..20: ncRNA_class = sgRNA
ggagaacgtccccggggcac

SEQ ID NO: 1950 - RNA, 20 nt, synthetic construct
  source 1..20: mol_type = other RNA
  ncRNA 1..20: ncRNA_class = sgRNA
catgcttgcattcccaggga

SEQ ID NO: 1951 - RNA, 20 nt, synthetic construct
  source 1..20: mol_type = other RNA
  ncRNA 1..20: ncRNA_class = sgRNA
gtgtgcaagccctgtgcccc

SEQ ID NO: 1952 - RNA, 20 nt, synthetic construct
  source 1..20: mol_type = other RNA
  ncRNA 1..20: ncRNA_class = sgRNA
atccgtggatgaagtcgtgt

SEQ ID NO: 1953 - RNA, 20 nt, synthetic construct
  source 1..20: mol_type = other RNA
  ncRNA 1..20: ncRNA_class = sgRNA
gcatccatgcttgcattccc

SEQ ID NO: 1954 - RNA, 20 nt, synthetic construct
  source 1..20: mol_type = other RNA
  ncRNA 1..20: ncRNA_class = sgRNA
gtgccgcccgggcttcggcg

SEQ ID NO: 1955 - RNA, 20 nt, synthetic construct
  source 1..20: mol_type = other RNA
  ncRNA 1..20: ncRNA_class = sgRNA
cttcatccacggatatttgc

SEQ ID NO: 1956 - RNA, 20 nt, synthetic construct
  source 1..20: mol_type = other RNA
  ncRNA 1..20: ncRNA_class = sgRNA
ggtgtgcaagccctgtgccc

SEQ ID NO: 1957 - RNA, 20 nt, synthetic construct
  source 1..20: mol_type = other RNA
  ncRNA 1..20: ncRNA_class = sgRNA
cgcaagtgccgcccgggctt

SEQ ID NO: 1958 - RNA, 20 nt, synthetic construct
  source 1..20: mol_type = other RNA
  ncRNA 1..20: ncRNA_class = sgRNA
gccgctgcgcaagtgccgcc

SEQ ID NO: 1959 - RNA, 20 nt, synthetic construct
  source 1..20: mol_type = other RNA
  ncRNA 1..20: ncRNA_class = sgRNA
gaactgtgtcatcatgaccc

SEQ ID NO: 1960 - RNA, 20 nt, synthetic construct
  source 1..20: mol_type = other RNA
  ncRNA 1..20: ncRNA_class = sgRNA
ttgcctgccgataaggcccg

SEQ ID NO: 1961 - RNA, 20 nt, synthetic construct
  source 1..20: mol_type = other RNA
  ncRNA 1..20: ncRNA_class = sgRNA
cgataaggcccggggtacac

SEQ ID NO: 1962 - RNA, 20 nt, synthetic construct
  source 1..20: mol_type = other RNA
  ncRNA 1..20: ncRNA_class = sgRNA
gataaggcccggggtacaca

SEQ ID NO: 1963 - RNA, 20 nt, synthetic construct
  source 1..20: mol_type = other RNA
  ncRNA 1..20: ncRNA_class = sgRNA
gcctgtggctggttccgagt

SEQ ID NO: 1964 - RNA, 20 nt, synthetic construct
  source 1..20: mol_type = other RNA
  ncRNA 1..20: ncRNA_class = sgRNA
tgcctgtggctggttccgag

SEQ ID NO: 1965 - RNA, 20 nt, synthetic construct
  source 1..20: mol_type = other RNA
  ncRNA 1..20: ncRNA_class = sgRNA
gatgcaggtgacattgacct

SEQ ID NO: 1966 - RNA, 20 nt, synthetic construct
  source 1..20: mol_type = other RNA
  ncRNA 1..20: ncRNA_class = sgRNA
gctacagacgttcacgatgc

SEQ ID NO: 1967 - RNA, 20 nt, synthetic construct
  source 1..20: mol_type = other RNA
  ncRNA 1..20: ncRNA_class = sgRNA
ctcccaagccagctccacaa

SEQ ID NO: 1968 - RNA, 20 nt, synthetic construct
  source 1..20: mol_type = other RNA
  ncRNA 1..20: ncRNA_class = sgRNA
cgtccttcggggactccgag

SEQ ID NO: 1969 - RNA, 20 nt, synthetic construct
  source 1..20: mol_type = other RNA
  ncRNA 1..20: ncRNA_class = sgRNA
ggggacctgctcgtccttcg

SEQ ID NO: 1970 - RNA, 20 nt, synthetic construct
  source 1..20: mol_type = other RNA
  ncRNA 1..20: ncRNA_class = sgRNA
gcaggtccccttctccaagg

SEQ ID NO: 1971 - RNA, 20 nt, synthetic construct
  source 1..20: mol_type = other RNA
  ncRNA 1..20: ncRNA_class = sgRNA
gcccactcggaaccagccac

SEQ ID NO: 1972 - RNA, 20 nt, synthetic construct
  source 1..20: mol_type = other RNA
  ncRNA 1..20: ncRNA_class = sgRNA
tggacagaagggcgcccact

SEQ ID NO: 1973 - RNA, 20 nt, synthetic construct
  source 1..20: mol_type = other RNA
  ncRNA 1..20: ncRNA_class = sgRNA
gccttatcggcaggcaagtg

SEQ ID NO: 1974 - RNA, 20 nt, synthetic construct
  source 1..20: mol_type = other RNA
  ncRNA 1..20: ncRNA_class = sgRNA
ggaatctgtgtctcccattg

SEQ ID NO: 1975 - RNA, 20 nt, synthetic construct
  source 1..20: mol_type = other RNA
  ncRNA 1..20: ncRNA_class = sgRNA
gcttctctctgcaggcacaa

SEQ ID NO: 1976 - RNA, 20 nt, synthetic construct
  source 1..20: mol_type = other RNA
  ncRNA 1..20: ncRNA_class = sgRNA
ggccagtgcgttggacagaa

SEQ ID NO: 1977 - RNA, 20 nt, synthetic construct
  source 1..20: mol_type = other RNA
  ncRNA 1..20: ncRNA_class = sgRNA
ctcgtccttcggggactccg

SEQ ID NO: 1978 - RNA, 20 nt, synthetic construct
  source 1..20: mol_type = other RNA
  ncRNA 1..20: ncRNA_class = sgRNA
acttgcctgccgataaggcc

SEQ ID NO: 1979 - RNA, 20 nt, synthetic construct
  source 1..20: mol_type = other RNA
  ncRNA 1..20: ncRNA_class = sgRNA
cggaaccagccacaggcacc

SEQ ID NO: 1980 - RNA, 20 nt, synthetic construct
  source 1..20: mol_type = other RNA
  ncRNA 1..20: ncRNA_class = sgRNA
accaggcgtggaggccagtg

SEQ ID NO: 1981 - RNA, 20 nt, synthetic construct
  source 1..20: mol_type = other RNA
  ncRNA 1..20: ncRNA_class = sgRNA
tcgtccttcggggactccga

SEQ ID NO: 1982 - RNA, 20 nt, synthetic construct
  source 1..20: mol_type = other RNA
  ncRNA 1..20: ncRNA_class = sgRNA
tgacattgacctgggtccca

SEQ ID NO: 1983 - RNA, 20 nt, synthetic construct
  source 1..20: mol_type = other RNA
  ncRNA 1..20: ncRNA_class = sgRNA
cgcactggccgagctctcca

SEQ ID NO: 1984 - RNA, 20 nt, synthetic construct
  source 1..20: mol_type = other RNA
  ncRNA 1..20: ncRNA_class = sgRNA
gtaccccgggccttatcggc

SEQ ID NO: 1985 - RNA, 20 nt, synthetic construct
  source 1..20: mol_type = other RNA
  ncRNA 1..20: ncRNA_class = sgRNA
cctgcagagagaagccaagg

SEQ ID NO: 1986 - RNA, 20 nt, synthetic construct
  source 1..20: mol_type = other RNA
  ncRNA 1..20: ncRNA_class = sgRNA
gtgcctgcagagagaagcca

SEQ ID NO: 1987 - RNA, 20 nt, synthetic construct
  source 1..20: mol_type = other RNA
  ncRNA 1..20: ncRNA_class = sgRNA
cttgcctgccgataaggccc

SEQ ID NO: 1988 - RNA, 20 nt, synthetic construct
  source 1..20: mol_type = other RNA
  ncRNA 1..20: ncRNA_class = sgRNA
cattgtggagctggcttggg

SEQ ID NO: 1989 - RNA, 20 nt, synthetic construct
  source 1..20: mol_type = other RNA
  ncRNA 1..20: ncRNA_class = sgRNA
ctcggggccctgtgtacccc

SEQ ID NO: 1990 - RNA, 20 nt, synthetic construct
  source 1..20: mol_type = other RNA
  ncRNA 1..20: ncRNA_class = sgRNA
cggccagtgcgttggacaga

SEQ ID NO: 1991 - RNA, 20 nt, synthetic construct
  source 1..20: mol_type = other RNA
  ncRNA 1..20: ncRNA_class = sgRNA
gccacaggcaccaggcgtgg

SEQ ID NO: 1992 - RNA, 20 nt, synthetic construct
  source 1..20: mol_type = other RNA
  ncRNA 1..20: ncRNA_class = sgRNA
cgcccttctgtccaacgcac

SEQ ID NO: 1993 - RNA, 20 nt, synthetic construct
  source 1..20: mol_type = other RNA
  ncRNA 1..20: ncRNA_class = sgRNA
cagcccctcggagtccccga

SEQ ID NO: 1994 - RNA, 20 nt, synthetic construct
  source 1..20: mol_type = other RNA
  ncRNA 1..20: ncRNA_class = sgRNA
tcagcaggtgctgctgctcg

SEQ ID NO: 1995 - RNA, 20 nt, synthetic construct
  source 1..20: mol_type = other RNA
  ncRNA 1..20: ncRNA_class = sgRNA
gctcggggccctgtgtaccc

SEQ ID NO: 1996 - RNA, 20 nt, synthetic construct
  source 1..20: mol_type = other RNA
  ncRNA 1..20: ncRNA_class = sgRNA
ggagagctcggccagtgcgt

SEQ ID NO: 1997 - RNA, 20 nt, synthetic construct
  source 1..20: mol_type = other RNA
  ncRNA 1..20: ncRNA_class = sgRNA
agctcggcgctgtgatcagc

SEQ ID NO: 1998 - RNA, 20 nt, synthetic construct
  source 1..20: mol_type = other RNA
  ncRNA 1..20: ncRNA_class = sgRNA
gggtctactaataataggag

SEQ ID NO: 1999 - RNA, 20 nt, synthetic construct
  source 1..20: mol_type = other RNA
  ncRNA 1..20: ncRNA_class = sgRNA
ctgtgtaccccgggccttat

SEQ ID NO: 2000 - RNA, 20 nt, synthetic construct
  source 1..20: mol_type = other RNA
  ncRNA 1..20: ncRNA_class = sgRNA
gggaggagcactgtgagctg

SEQ ID NO: 2001 - RNA, 20 nt, synthetic construct
  source 1..20: mol_type = other RNA
  ncRNA 1..20: ncRNA_class = sgRNA
ccgaaaggcacattcctcct

SEQ ID NO: 2002 - RNA, 20 nt, synthetic construct
  source 1..20: mol_type = other RNA
  ncRNA 1..20: ncRNA_class = sgRNA
aaggggacctgctcgtcctt

SEQ ID NO: 2003 - RNA, 20 nt, synthetic construct
  source 1..20: mol_type = other RNA
  ncRNA 1..20: ncRNA_class = sgRNA
agacacagattccagcccct

SEQ ID NO: 2004 - RNA, 20 nt, synthetic construct
  source 1..20: mol_type = other RNA
  ncRNA 1..20: ncRNA_class = sgRNA
cgagcaggtccccttctcca

SEQ ID NO: 2005 - RNA, 20 nt, synthetic construct
  source 1..20: mol_type = other RNA
  ncRNA 1..20: ncRNA_class = sgRNA
tcccaagccagctccacaat

SEQ ID NO: 2006 - RNA, 20 nt, synthetic construct
  source 1..20: mol_type = other RNA
  ncRNA 1..20: ncRNA_class = sgRNA
ctgggtcccatggccaccag

SEQ ID NO: 2007 - RNA, 20 nt, synthetic construct
  source 1..20: mol_type = other RNA
  ncRNA 1..20: ncRNA_class = sgRNA
gcctcacttgcctgccgata

SEQ ID NO: 2008 - RNA, 20 nt, synthetic construct
  source 1..20: mol_type = other RNA
  ncRNA 1..20: ncRNA_class = sgRNA
ggcttctctctgcaggcaca

SEQ ID NO: 2009 - RNA, 20 nt, synthetic construct
  source 1..20: mol_type = other RNA
  ncRNA 1..20: ncRNA_class = sgRNA
ccagccacaggcaccaggcg

SEQ ID NO: 2010 - RNA, 20 nt, synthetic construct
  source 1..20: mol_type = other RNA
  ncRNA 1..20: ncRNA_class = sgRNA
gggaggcccgggccagcacc

SEQ ID NO: 2011 - RNA, 20 nt, synthetic construct
  source 1..20: mol_type = other RNA
  ncRNA 1..20: ncRNA_class = sgRNA
gccttgggtctactaataat

SEQ ID NO: 2012 - RNA, 20 nt, synthetic construct
  source 1..20: mol_type = other RNA
  ncRNA 1..20: ncRNA_class = sgRNA
cgatgcaggtgacattgacc

SEQ ID NO: 2013 - RNA, 20 nt, synthetic construct
  source 1..20: mol_type = other RNA
  ncRNA 1..20: ncRNA_class = sgRNA
gcctccacgcctggtgcctg

SEQ ID NO: 2014 - RNA, 20 nt, synthetic construct
  source 1..20: mol_type = other RNA
  ncRNA 1..20: ncRNA_class = sgRNA
gcacattcctccttggagaa

SEQ ID NO: 2015 - RNA, 20 nt, synthetic construct
  source 1..20: mol_type = other RNA
  ncRNA 1..20: ncRNA_class = sgRNA
ggagtccccgaaggacgagc

SEQ ID NO: 2016 - RNA, 20 nt, synthetic construct
  source 1..20: mol_type = other RNA
  ncRNA 1..20: ncRNA_class = sgRNA
ccaccttggcttctctctgc

SEQ ID NO: 2017 - RNA, 20 nt, synthetic construct
  source 1..20: mol_type = other RNA
  ncRNA 1..20: ncRNA_class = sgRNA
aggggacctgctcgtccttc

SEQ ID NO: 2018 - RNA, 20 nt, synthetic construct
  source 1..20: mol_type = other RNA
  ncRNA 1..20: ncRNA_class = sgRNA
tcccattgtggagctggctt

SEQ ID NO: 2019 - RNA, 20 nt, synthetic construct
  source 1..20: mol_type = other RNA
  ncRNA 1..20: ncRNA_class = sgRNA
tgagctcccggtgctggccc

SEQ ID NO: 2020 - RNA, 20 nt, synthetic construct
  source 1..20: mol_type = other RNA
  ncRNA 1..20: ncRNA_class = sgRNA
ggggaggcccgggccagcac

SEQ ID NO: 2021 - RNA, 20 nt, synthetic construct
  source 1..20: mol_type = other RNA
  ncRNA 1..20: ncRNA_class = sgRNA
acgcactggccgagctctcc

SEQ ID NO: 2022 - RNA, 20 nt, synthetic construct
  source 1..20: mol_type = other RNA
  ncRNA 1..20: ncRNA_class = sgRNA
ccacgcctggtgcctgtggc

SEQ ID NO: 2023 - RNA, 20 nt, synthetic construct
  source 1..20: mol_type = other RNA
  ncRNA 1..20: ncRNA_class = sgRNA
attcttcccctggtggccat

SEQ ID NO: 2024 - RNA, 20 nt, synthetic construct
  source 1..20: mol_type = other RNA
  ncRNA 1..20: ncRNA_class = sgRNA
cgggccagcaccgggagctc

SEQ ID NO: 2025 - RNA, 20 nt, synthetic construct
  source 1..20: mol_type = other RNA
  ncRNA 1..20: ncRNA_class = sgRNA
ctgagctcccggtgctggcc

SEQ ID NO: 2026 - RNA, 20 nt, synthetic construct
  source 1..20: mol_type = other RNA
  ncRNA 1..20: ncRNA_class = sgRNA
gagctccagcagcagctccc

SEQ ID NO: 2027 - RNA, 20 nt, synthetic construct
  source 1..20: mol_type = other RNA
  ncRNA 1..20: ncRNA_class = sgRNA
caccaggcgtggaggccagt

SEQ ID NO: 2028 - RNA, 20 nt, synthetic construct
  source 1..20: mol_type = other RNA
  ncRNA 1..20: ncRNA_class = sgRNA
cctgggtcccatggccacca

SEQ ID NO: 2029 - RNA, 20 nt, synthetic construct
  source 1..20: mol_type = other RNA
  ncRNA 1..20: ncRNA_class = sgRNA
gatcagcaggtgctgctgct

SEQ ID NO: 2030 - RNA, 20 nt, synthetic construct
  source 1..20: mol_type = other RNA
  ncRNA 1..20: ncRNA_class = sgRNA
ggcacattcctccttggaga

SEQ ID NO: 2031 - RNA, 20 nt, synthetic construct
  source 1..20: mol_type = other RNA
  ncRNA 1..20: ncRNA_class = sgRNA
ccctggtggccatgggaccc

SEQ ID NO: 2032 - RNA, 20 nt, synthetic construct
  source 1..20: mol_type = other RNA
  ncRNA 1..20: ncRNA_class = sgRNA
gccccactggcctccacgcc

SEQ ID NO: 2033 - RNA, 20 nt, synthetic construct
  source 1..20: mol_type = other RNA
  ncRNA 1..20: ncRNA_class = sgRNA
ctcccattgtggagctggct

SEQ ID NO: 2034 - RNA, 20 nt, synthetic construct
  source 1..20: mol_type = other RNA
  ncRNA 1..20: ncRNA_class = sgRNA
cttcggggactccgaggggc

SEQ ID NO: 2035 - RNA, 20 nt, synthetic construct
  source 1..20: mol_type = other RNA
  ncRNA 1..20: ncRNA_class = sgRNA
agggagctgctgctggagct

SEQ ID NO: 2036 - RNA, 20 nt, synthetic construct
  source 1..20: mol_type = other RNA
  ncRNA 1..20: ncRNA_class = sgRNA
gattcttcccctggtggcca

SEQ ID NO: 2037 - RNA, 20 nt, synthetic construct
  source 1..20: mol_type = other RNA
  ncRNA 1..20: ncRNA_class = sgRNA
cagcagctccctggagagct

SEQ ID NO: 2038 - RNA, 20 nt, synthetic construct
  source 1..20: mol_type = other RNA
  ncRNA 1..20: ncRNA_class = sgRNA
acctgggtcccatggccacc

SEQ ID NO: 2039 - RNA, 20 nt, synthetic construct
  source 1..20: mol_type = other RNA
  ncRNA 1..20: ncRNA_class = sgRNA
tgtgtctcccattgtggagc

SEQ ID NO: 2040 - RNA, 20 nt, synthetic construct
  source 1..20: mol_type = other RNA
  ncRNA 1..20: ncRNA_class = sgRNA
cacattcctccttggagaag

SEQ ID NO: 2041 - RNA, 20 nt, synthetic construct
  source 1..20: mol_type = other RNA
  ncRNA 1..20: ncRNA_class = sgRNA
ggtgctggcccgggcctccc

SEQ ID NO: 2042 - RNA, 20 nt, synthetic construct
  source 1..20: mol_type = other RNA
  ncRNA 1..20: ncRNA_class = sgRNA
gcgtggaggccagtggggcc

SEQ ID NO: 2043 - RNA, 20 nt, synthetic construct
  source 1..20: mol_type = other RNA
  ncRNA 1..20: ncRNA_class = sgRNA
cgtggaggccagtggggccg

SEQ ID NO: 2044 - RNA, 20 nt, synthetic construct
  source 1..20: mol_type = other RNA
  ncRNA 1..20: ncRNA_class = sgRNA
cagtggggccggggaggccc

SEQ ID NO: 2045 - RNA, 20 nt, synthetic construct
  source 1..20: mol_type = other RNA
  ncRNA 1..20: ncRNA_class = sgRNA
atcagcaggtgctgctgctc

SEQ ID NO: 2046 - RNA, 20 nt, synthetic construct
  source 1..20: mol_type = other RNA
  ncRNA 1..20: ncRNA_class = sgRNA
ccagtggggccggggaggcc

SEQ ID NO: 2047 - RNA, 20 nt, synthetic construct
  source 1..20: mol_type = other RNA
  ncRNA 1..20: ncRNA_class = sgRNA
ccgggcctccccggccccac

SEQ ID NO: 2048 - RNA, 20 nt, synthetic construct
  source 1..20: mol_type = other RNA
  ncRNA 1..20: ncRNA_class = sgRNA
ggcgtggaggccagtggggc

SEQ ID NO: 2049 - RNA, 20 nt, synthetic construct
  source 1..20: mol_type = other RNA
  ncRNA 1..20: ncRNA_class = sgRNA
ggaggccagtggggccgggg

SEQ ID NO: 2050 - RNA, 20 nt, synthetic construct
  source 1..20: mol_type = other RNA
  ncRNA 1..20: ncRNA_class = sgRNA
gctctccagggagctgctgc

SEQ ID NO: 2051 - RNA, 20 nt, synthetic construct
  source 1..20: mol_type = other RNA
  ncRNA 1..20: ncRNA_class = sgRNA
ctggggccatactccgggtg

SEQ ID NO: 2052 - RNA, 20 nt, synthetic construct
  source 1..20: mol_type = other RNA
  ncRNA 1..20: ncRNA_class = sgRNA
cctggggccatactccgggt

SEQ ID NO: 2053 - RNA, 20 nt, synthetic construct
  source 1..20: mol_type = other RNA
  ncRNA 1..20: ncRNA_class = sgRNA
ccacccggagtatggcccca

SEQ ID NO: 2054 - RNA, 20 nt, synthetic construct
  source 1..20: mol_type = other RNA
  ncRNA 1..20: ncRNA_class = sgRNA
cacccggagtatggccccag

SEQ ID NO: 2055 - RNA, 20 nt, synthetic construct
  source 1..20: mol_type = other RNA
  ncRNA 1..20: ncRNA_class = sgRNA
tgttgggatcgtgtggacac

SEQ ID NO: 2056 - RNA, 20 nt, synthetic construct
  source 1..20: mol_type = other RNA
  ncRNA 1..20: ncRNA_class = sgRNA
ctgcgtgtgttgggatcgtg

SEQ ID NO: 2057 - RNA, 20 nt, synthetic construct
  source 1..20: mol_type = other RNA
  ncRNA 1..20: ncRNA_class = sgRNA
tggagttggctgcgtgtgtt

SEQ ID NO: 2058 - RNA, 20 nt, synthetic construct
  source 1..20: mol_type = other RNA
  ncRNA 1..20: ncRNA_class = sgRNA
cagtgctcccttcagctggg

SEQ ID NO: 2059 - RNA, 20 nt, synthetic construct
  source 1..20: mol_type = other RNA
  ncRNA 1..20: ncRNA_class = sgRNA
attgtgggtgtgacagcctt

SEQ ID NO: 2060 - RNA, 20 nt, synthetic construct
  source 1..20: mol_type = other RNA
  ncRNA 1..20: ncRNA_class = sgRNA
gatcgtgtggacactggctg

SEQ ID NO: 2061 - RNA, 20 nt, synthetic construct
  source 1..20: mol_type = other RNA
  ncRNA 1..20: ncRNA_class = sgRNA
tggggccatactccgggtgg

SEQ ID NO: 2062 - RNA, 20 nt, synthetic construct
  source 1..20: mol_type = other RNA
  ncRNA 1..20: ncRNA_class = sgRNA
gcccattgggagcaggaagg

SEQ ID NO: 2063 - RNA, 20 nt, synthetic construct
  source 1..20: mol_type = other RNA
  ncRNA 1..20: ncRNA_class = sgRNA
ccctggggccatactccggg

SEQ ID NO: 2064 - RNA, 20 nt, synthetic construct
  source 1..20: mol_type = other RNA
  ncRNA 1..20: ncRNA_class = sgRNA
cacgtcccccacccggagta

SEQ ID NO: 2065 - RNA, 20 nt, synthetic construct
  source 1..20: mol_type = other RNA
  ncRNA 1..20: ncRNA_class = sgRNA
ctgcccctggggccatactc

SEQ ID NO: 2066 - RNA, 20 nt, synthetic construct
  source 1..20: mol_type = other RNA
  ncRNA 1..20: ncRNA_class = sgRNA
ggggtaagtgtactgcccct

SEQ ID NO: 2067 - RNA, 20 nt, synthetic construct
  source 1..20: mol_type = other RNA
  ncRNA 1..20: ncRNA_class = sgRNA
ggatcgtgtggacactggct

SEQ ID NO: 2068 - RNA, 20 nt, synthetic construct
  source 1..20: mol_type = other RNA
  ncRNA 1..20: ncRNA_class = sgRNA
ctggagttggctgcgtgtgt

SEQ ID NO: 2069 - RNA, 20 nt, synthetic construct
  source 1..20: mol_type = other RNA
  ncRNA 1..20: ncRNA_class = sgRNA
gcacgtccacgtcccccacc

SEQ ID NO: 2070 - RNA, 20 nt, synthetic construct
  source 1..20: mol_type = other RNA
  ncRNA 1..20: ncRNA_class = sgRNA
gggtaagtgtactgcccctg

SEQ ID NO: 2071 - RNA, 20 nt, synthetic construct
  source 1..20: mol_type = other RNA
  ncRNA 1..20: ncRNA_class = sgRNA
cccacccggagtatggcccc

SEQ ID NO: 2072 - RNA, 20 nt, synthetic construct
  source 1..20: mol_type = other RNA
  ncRNA 1..20: ncRNA_class = sgRNA
ggggcccattgggagcagga

SEQ ID NO: 2073 - RNA, 20 nt, synthetic construct
  source 1..20: mol_type = other RNA
  ncRNA 1..20: ncRNA_class = sgRNA
tgcccctggggccatactcc

SEQ ID NO: 2074 - RNA, 20 nt, synthetic construct
  source 1..20: mol_type = other RNA
  ncRNA 1..20: ncRNA_class = sgRNA
ggcgacttcgctcttccagt

SEQ ID NO: 2075 - RNA, 20 nt, synthetic construct
  source 1..20: mol_type = other RNA
  ncRNA 1..20: ncRNA_class = sgRNA
gaggtgcttggagcagtgct

SEQ ID NO: 2076 - RNA, 20 nt, synthetic construct
  source 1..20: mol_type = other RNA
  ncRNA 1..20: ncRNA_class = sgRNA
gggatcgtgtggacactggc

SEQ ID NO: 2077 - RNA, 20 nt, synthetic construct
  source 1..20: mol_type = other RNA
  ncRNA 1..20: ncRNA_class = sgRNA
ccagtgctcccttcagctgg

SEQ ID NO: 2078 - RNA, 20 nt, synthetic construct
  source 1..20: mol_type = other RNA
  ncRNA 1..20: ncRNA_class = sgRNA
tggggtaagtgtactgcccc

SEQ ID NO: 2079 - RNA, 20 nt, synthetic construct
  source 1..20: mol_type = other RNA
  ncRNA 1..20: ncRNA_class = sgRNA
gccccagccccccagctgaa

SEQ ID NO: 2080 - RNA, 20 nt, synthetic construct
  source 1..20: mol_type = other RNA
  ncRNA 1..20: ncRNA_class = sgRNA
gccagtgctcccttcagctg

SEQ ID NO: 2081 - RNA, 20 nt, synthetic construct
  source 1..20: mol_type = other RNA
  ncRNA 1..20: ncRNA_class = sgRNA
cgccagtgctcccttcagct

SEQ ID NO: 2082 - RNA, 20 nt, synthetic construct
  source 1..20: mol_type = other RNA
  ncRNA 1..20: ncRNA_class = sgRNA
ctggggggctggggcccatt

SEQ ID NO: 2083 - RNA, 20 nt, synthetic construct
  source 1..20: mol_type = other RNA
  ncRNA 1..20: ncRNA_class = sgRNA
gattgtgggtgtgacagcct

SEQ ID NO: 2084 - RNA, 20 nt, synthetic construct
  source 1..20: mol_type = other RNA
  ncRNA 1..20: ncRNA_class = sgRNA
ggctggggcccattgggagc

SEQ ID NO: 2085 - RNA, 20 nt, synthetic construct
  source 1..20: mol_type = other RNA
  ncRNA 1..20: ncRNA_class = sgRNA
cccccagctgaagggagcac

SEQ ID NO: 2086 - RNA, 20 nt, synthetic construct
  source 1..20: mol_type = other RNA
  ncRNA 1..20: ncRNA_class = sgRNA
gcagtgctgggttctggagt

SEQ ID NO: 2087 - RNA, 20 nt, synthetic construct
  source 1..20: mol_type = other RNA
  ncRNA 1..20: ncRNA_class = sgRNA
tcgccagtgctcccttcagc

SEQ ID NO: 2088 - RNA, 20 nt, synthetic construct
  source 1..20: mol_type = other RNA
  ncRNA 1..20: ncRNA_class = sgRNA
cacctccttcctgctcccaa

SEQ ID NO: 2089 - RNA, 20 nt, synthetic construct
  source 1..20: mol_type = other RNA
  ncRNA 1..20: ncRNA_class = sgRNA
gggagcaggaaggaggtgct

SEQ ID NO: 2090 - RNA, 20 nt, synthetic construct
  source 1..20: mol_type = other RNA
  ncRNA 1..20: ncRNA_class = sgRNA
ggaggtgcttggagcagtgc

SEQ ID NO: 2091 - RNA, 20 nt, synthetic construct
  source 1..20: mol_type = other RNA
  ncRNA 1..20: ncRNA_class = sgRNA
catactccgggtgggggacg

SEQ ID NO: 2092 - RNA, 20 nt, synthetic construct
  source 1..20: mol_type = other RNA
  ncRNA 1..20: ncRNA_class = sgRNA
ctcccttcagctggggggct

SEQ ID NO: 2093 - RNA, 20 nt, synthetic construct
  source 1..20: mol_type = other RNA
  ncRNA 1..20: ncRNA_class = sgRNA
cttggagcagtgctgggttc

SEQ ID NO: 2094 - RNA, 20 nt, synthetic construct
  source 1..20: mol_type = other RNA
  ncRNA 1..20: ncRNA_class = sgRNA
ggccccagccccccagctga

SEQ ID NO: 2095 - RNA, 20 nt, synthetic construct
  source 1..20: mol_type = other RNA
  ncRNA 1..20: ncRNA_class = sgRNA
gctggggggctggggcccat

SEQ ID NO: 2096 - RNA, 20 nt, synthetic construct
  source 1..20: mol_type = other RNA
  ncRNA 1..20: ncRNA_class = sgRNA
tcccttcagctggggggctg

SEQ ID NO: 2097 - RNA, 20 nt, synthetic construct
  source 1..20: mol_type = other RNA
  ncRNA 1..20: ncRNA_class = sgRNA
acctccttcctgctcccaat

SEQ ID NO: 2098 - RNA, 20 nt, synthetic construct
  source 1..20: mol_type = other RNA
  ncRNA 1..20: ncRNA_class = sgRNA
gctcccttcagctggggggc

SEQ ID NO: 2099 - RNA, 20 nt, synthetic construct
  source 1..20: mol_type = other RNA
  ncRNA 1..20: ncRNA_class = sgRNA
gagacgccagagaccctgct

SEQ ID NO: 2100 - RNA, 20 nt, synthetic construct
  source 1..20: mol_type = other RNA
  ncRNA 1..20: ncRNA_class = sgRNA
cgtctccagctgtgaccgaa

SEQ ID NO: 2101 - RNA, 20 nt, synthetic construct
  source 1..20: mol_type = other RNA
  ncRNA 1..20: ncRNA_class = sgRNA
cccttggagtgcctgatgct

SEQ ID NO: 2102 - RNA, 20 nt, synthetic construct
  source 1..20: mol_type = other RNA
  ncRNA 1..20: ncRNA_class = sgRNA
cccagcatcaggcactccaa

SEQ ID NO: 2103 - RNA, 20 nt, synthetic construct
  source 1..20: mol_type = other RNA
  ncRNA 1..20: ncRNA_class = sgRNA
atgtgcctttcggtcacagc

SEQ ID NO: 2104 - RNA, 20 nt, synthetic construct
  source 1..20: mol_type = other RNA
  ncRNA 1..20: ncRNA_class = sgRNA
tcccagcatcaggcactcca

SEQ ID NO: 2105 - RNA, 20 nt, synthetic construct
  source 1..20: mol_type = other RNA
  ncRNA 1..20: ncRNA_class = sgRNA
ctcttcggtgctccccagca

SEQ ID NO: 2106 - RNA, 20 nt, synthetic construct
  source 1..20: mol_type = other RNA
  ncRNA 1..20: ncRNA_class = sgRNA
aaggggcaggggcttctctt

SEQ ID NO: 2107 - RNA, 20 nt, synthetic construct
  source 1..20: mol_type = other RNA
  ncRNA 1..20: ncRNA_class = sgRNA
ccagcatcaggcactccaag

SEQ ID NO: 2108 - RNA, 20 nt, synthetic construct
  source 1..20: mol_type = other RNA
  ncRNA 1..20: ncRNA_class = sgRNA
ccaaggaggaatgtgccttt

SEQ ID NO: 2109 - RNA, 20 nt, synthetic construct
  source 1..20: mol_type = other RNA
  ncRNA 1..20: ncRNA_class = sgRNA
tctcttcggtgctccccagc

SEQ ID NO: 2110 - RNA, 20 nt, synthetic construct
  source 1..20: mol_type = other RNA
  ncRNA 1..20: ncRNA_class = sgRNA
ctgggcttcatcccagcatc

SEQ ID NO: 2111 - RNA, 20 nt, synthetic construct
  source 1..20: mol_type = other RNA
  ncRNA 1..20: ncRNA_class = sgRNA
atcaggcactccaaggggca

SEQ ID NO: 2112 - RNA, 20 nt, synthetic construct
  source 1..20: mol_type = other RNA
  ncRNA 1..20: ncRNA_class = sgRNA
gaagagaagcccctgcccct

SEQ ID NO: 2113 - RNA, 20 nt, synthetic construct
  source 1..20: mol_type = other RNA
  ncRNA 1..20: ncRNA_class = sgRNA
catcaggcactccaaggggc

SEQ ID NO: 2114 - RNA, 20 nt, synthetic construct
  source 1..20: mol_type = other RNA
  ncRNA 1..20: ncRNA_class = sgRNA
ggagacgccagagaccctgc

SEQ ID NO: 2115 - RNA, 20 nt, synthetic construct
  source 1..20: mol_type = other RNA
  ncRNA 1..20: ncRNA_class = sgRNA
tcaggcactccaaggggcag

SEQ ID NO: 2116 - RNA, 20 nt, synthetic construct
  source 1..20: mol_type = other RNA
  ncRNA 1..20: ncRNA_class = sgRNA
gtgctccccagcagggtctc

SEQ ID NO: 2117 - RNA, 20 nt, synthetic construct
  source 1..20: mol_type = other RNA
  ncRNA 1..20: ncRNA_class = sgRNA
ccccttggagtgcctgatgc

SEQ ID NO: 2118 - RNA, 20 nt, synthetic construct
  source 1..20: mol_type = other RNA
  ncRNA 1..20: ncRNA_class = sgRNA
agacgccagagaccctgctg

SEQ ID NO: 2119 - RNA, 20 nt, synthetic construct
  source 1..20: mol_type = other RNA
  ncRNA 1..20: ncRNA_class = sgRNA
tggttctccgacgcatatgg

SEQ ID NO: 2120 - RNA, 20 nt, synthetic construct
  source 1..20: mol_type = other RNA
  ncRNA 1..20: ncRNA_class = sgRNA
gtcggagaaccagacctgca

SEQ ID NO: 2121 - RNA, 20 nt, synthetic construct
  source 1..20: mol_type = other RNA
  ncRNA 1..20: ncRNA_class = sgRNA
ggagcagcagatgcggtgct

SEQ ID NO: 2122 - RNA, 20 nt, synthetic construct
  source 1..20: mol_type = other RNA
  ncRNA 1..20: ncRNA_class = sgRNA
gctacatttagctgagacat

SEQ ID NO: 2123 - RNA, 20 nt, synthetic construct
  source 1..20: mol_type = other RNA
  ncRNA 1..20: ncRNA_class = sgRNA
atgtggcacaaactgtgtcc

SEQ ID NO: 2124 - RNA, 20 nt, synthetic construct
  source 1..20: mol_type = other RNA
  ncRNA 1..20: ncRNA_class = sgRNA
ttgccccctgcacaagcaaa

SEQ ID NO: 2125 - RNA, 20 nt, synthetic construct
  source 1..20: mol_type = other RNA
  ncRNA 1..20: ncRNA_class = sgRNA
ccgaagaggcccagcaccag

SEQ ID NO: 2126 - RNA, 20 nt, synthetic construct
  source 1..20: mol_type = other RNA
  ncRNA 1..20: ncRNA_class = sgRNA
gtctggttctccgacgcata

SEQ ID NO: 2127 - RNA, 20 nt, synthetic construct
  source 1..20: mol_type = other RNA
  ncRNA 1..20: ncRNA_class = sgRNA
gagcagcagatgcggtgctg

SEQ ID NO: 2128 - RNA, 20 nt, synthetic construct
  source 1..20: mol_type = other RNA
  ncRNA 1..20: ncRNA_class = sgRNA
tgcagggggcaatctcctcg

SEQ ID NO: 2129 - RNA, 20 nt, synthetic construct
  source 1..20: mol_type = other RNA
  ncRNA 1..20: ncRNA_class = sgRNA
gtagttccagtgctcgttgt

SEQ ID NO: 2130 - RNA, 20 nt, synthetic construct
  source 1..20: mol_type = other RNA
  ncRNA 1..20: ncRNA_class = sgRNA
atgctgccaggagcccgaag

SEQ ID NO: 2131 - RNA, 20 nt, synthetic construct
  source 1..20: mol_type = other RNA
  ncRNA 1..20: ncRNA_class = sgRNA
cttccgtttgcttgtgcagg

SEQ ID NO: 2132 - RNA, 20 nt, synthetic construct
  source 1..20: mol_type = other RNA
  ncRNA 1..20: ncRNA_class = sgRNA
gggagcagcagatgcggtgc

SEQ ID NO: 2133 - RNA, 20 nt, synthetic construct
  source 1..20: mol_type = other RNA
  ncRNA 1..20: ncRNA_class = sgRNA
aggcccccaggccaggccgg

SEQ ID NO: 2134 - RNA, 20 nt, synthetic construct
  source 1..20: mol_type = other RNA
  ncRNA 1..20: ncRNA_class = sgRNA
cagctaaatgtagccgcatc

SEQ ID NO: 2135 - RNA, 20 nt, synthetic construct
  source 1..20: mol_type = other RNA
  ncRNA 1..20: ncRNA_class = sgRNA
gtgctcgttgtaggaattct

SEQ ID NO: 2136 - RNA, 20 nt, synthetic construct
  source 1..20: mol_type = other RNA
  ncRNA 1..20: ncRNA_class = sgRNA
ccgggggcagaggtggccca

SEQ ID NO: 2137 - RNA, 20 nt, synthetic construct
  source 1..20: mol_type = other RNA
  ncRNA 1..20: ncRNA_class = sgRNA
tcttccgtttgcttgtgcag

SEQ ID NO: 2138 - RNA, 20 nt, synthetic construct
  source 1..20: mol_type = other RNA
  ncRNA 1..20: ncRNA_class = sgRNA
tcccggctggcagcggcact

SEQ ID NO: 2139 - RNA, 20 nt, synthetic construct
  source 1..20: mol_type = other RNA
  ncRNA 1..20: ncRNA_class = sgRNA
agctaaatgtagccgcatcc

SEQ ID NO: 2140 - RNA, 20 nt, synthetic construct
  source 1..20: mol_type = other RNA
  ncRNA 1..20: ncRNA_class = sgRNA
ggggcggcacagctggcaga

SEQ ID NO: 2141 - RNA, 20 nt, synthetic construct
  source 1..20: mol_type = other RNA
  ncRNA 1..20: ncRNA_class = sgRNA
ggcagcatcgcagccccagg

SEQ ID NO: 2142 - RNA, 20 nt, synthetic construct
  source 1..20: mol_type = other RNA
  ncRNA 1..20: ncRNA_class = sgRNA
gtaggaattctcggcacatg

SEQ ID NO: 2143 - RNA, 20 nt, synthetic construct
  source 1..20: mol_type = other RNA
  ncRNA 1..20: ncRNA_class = sgRNA
cgtcggagaaccagacctgc

SEQ ID NO: 2144 - RNA, 20 nt, synthetic construct
  source 1..20: mol_type = other RNA
  ncRNA 1..20: ncRNA_class = sgRNA
gaaccagacctgcagggacc

SEQ ID NO: 2145 - RNA, 20 nt, synthetic construct
  source 1..20: mol_type = other RNA
  ncRNA 1..20: ncRNA_class = sgRNA
ggcacagctggcagatggtc

SEQ ID NO: 2146 - RNA, 20 nt, synthetic construct
  source 1..20: mol_type = other RNA
  ncRNA 1..20: ncRNA_class = sgRNA
ctgcccccggcctggcctgg

SEQ ID NO: 2147 - RNA, 20 nt, synthetic construct
  source 1..20: mol_type = other RNA
  ncRNA 1..20: ncRNA_class = sgRNA
cctggggctgcgatgctgcc

SEQ ID NO: 2148 - RNA, 20 nt, synthetic construct
  source 1..20: mol_type = other RNA
  ncRNA 1..20: ncRNA_class = sgRNA
cctctggtgctgggcctctt

SEQ ID NO: 2149 - RNA, 20 nt, synthetic construct
  source 1..20: mol_type = other RNA
  ncRNA 1..20: ncRNA_class = sgRNA
agaattcctacaacgagcac

SEQ ID NO: 2150 - RNA, 20 nt, synthetic construct
  source 1..20: mol_type = other RNA
  ncRNA 1..20: ncRNA_class = sgRNA
cacaaactgtgtcccggatg

SEQ ID NO: 2151 - RNA, 20 nt, synthetic construct
  source 1..20: mol_type = other RNA
  ncRNA 1..20: ncRNA_class = sgRNA
ctgtgccgcccctgtgaccc

SEQ ID NO: 2152 - RNA, 20 nt, synthetic construct
  source 1..20: mol_type = other RNA
  ncRNA 1..20: ncRNA_class = sgRNA
gctgggcctcttcgggctcc

SEQ ID NO: 2153 - RNA, 20 nt, synthetic construct
  source 1..20: mol_type = other RNA
  ncRNA 1..20: ncRNA_class = sgRNA
ccttgggccacctctgcccc

SEQ ID NO: 2154 - RNA, 20 nt, synthetic construct
  source 1..20: mol_type = other RNA
  ncRNA 1..20: ncRNA_class = sgRNA
cctggcagcatcgcagcccc

SEQ ID NO: 2155 - RNA, 20 nt, synthetic construct
  source 1..20: mol_type = other RNA
  ncRNA 1..20: ncRNA_class = sgRNA
gggcagaggtggcccaaggc

SEQ ID NO: 2156 - RNA, 20 nt, synthetic construct
  source 1..20: mol_type = other RNA
  ncRNA 1..20: ncRNA_class = sgRNA
gcctgggggcctctggtgct

SEQ ID NO: 2157 - RNA, 20 nt, synthetic construct
  source 1..20: mol_type = other RNA
  ncRNA 1..20: ncRNA_class = sgRNA
tgctgctcccgctgcccgcc

SEQ ID NO: 2158 - RNA, 20 nt, synthetic construct
  source 1..20: mol_type = other RNA
  ncRNA 1..20: ncRNA_class = sgRNA
gcccagcaccagaggccccc

SEQ ID NO: 2159 - RNA, 20 nt, synthetic construct
  source 1..20: mol_type = other RNA
  ncRNA 1..20: ncRNA_class = sgRNA
ttcccggctggcagcggcac

SEQ ID NO: 2160 - RNA, 20 nt, synthetic construct
  source 1..20: mol_type = other RNA
  ncRNA 1..20: ncRNA_class = sgRNA
tttcctggtccctgcaggtc

SEQ ID NO: 2161 - RNA, 20 nt, synthetic construct
  source 1..20: mol_type = other RNA
  ncRNA 1..20: ncRNA_class = sgRNA
gaggcccccaggccaggccg

SEQ ID NO: 2162 - RNA, 20 nt, synthetic construct
  source 1..20: mol_type = other RNA
  ncRNA 1..20: ncRNA_class = sgRNA
ggtcacaggggcggcacagc

SEQ ID NO: 2163 - RNA, 20 nt, synthetic construct
  source 1..20: mol_type = other RNA
  ncRNA 1..20: ncRNA_class = sgRNA
cagaggcccccaggccaggc

SEQ ID NO: 2164 - RNA, 20 nt, synthetic construct
  source 1..20: mol_type = other RNA
  ncRNA 1..20: ncRNA_class = sgRNA
ttccttttcctggtccctgc

SEQ ID NO: 2165 - RNA, 20 nt, synthetic construct
  source 1..20: mol_type = other RNA
  ncRNA 1..20: ncRNA_class = sgRNA
gacctgcagggaccaggaaa

SEQ ID NO: 2166 - RNA, 20 nt, synthetic construct
  source 1..20: mol_type = other RNA
  ncRNA 1..20: ncRNA_class = sgRNA
gcaccagaggcccccaggcc

SEQ ID NO: 2167 - RNA, 20 nt, synthetic construct
  source 1..20: mol_type = other RNA
  ncRNA 1..20: ncRNA_class = sgRNA
ggcagcgggagcagcagatg

SEQ ID NO: 2168 - RNA, 20 nt, synthetic construct
  source 1..20: mol_type = other RNA
  ncRNA 1..20: ncRNA_class = sgRNA
ggccacctctgcccccggcc

SEQ ID NO: 2169 - RNA, 20 nt, synthetic construct
  source 1..20: mol_type = other RNA
  ncRNA 1..20: ncRNA_class = sgRNA
gctcatagtattccttttcc

SEQ ID NO: 2170 - RNA, 20 nt, synthetic construct
  source 1..20: mol_type = other RNA
  ncRNA 1..20: ncRNA_class = sgRNA
ggcctgggggcctctggtgc

SEQ ID NO: 2171 - RNA, 20 nt, synthetic construct
  source 1..20: mol_type = other RNA
  ncRNA 1..20: ncRNA_class = sgRNA
cggcctggcctgggggcctc

SEQ ID NO: 2172 - RNA, 20 nt, synthetic construct
  source 1..20: mol_type = other RNA
  ncRNA 1..20: ncRNA_class = sgRNA
ctctggtgctgggcctcttc

SEQ ID NO: 2173 - RNA, 20 nt, synthetic construct
  source 1..20: mol_type = other RNA
  ncRNA 1..20: ncRNA_class = sgRNA
ctctgcccccggcctggcct

SEQ ID NO: 2174 - RNA, 20 nt, synthetic construct
  source 1..20: mol_type = other RNA
  ncRNA 1..20: ncRNA_class = sgRNA
gctcgcagtgtgtacactcg

SEQ ID NO: 2175 - RNA, 20 nt, synthetic construct
  source 1..20: mol_type = other RNA
  ncRNA 1..20: ncRNA_class = sgRNA
tggaagtgcccggccttgca

SEQ ID NO: 2176 - RNA, 20 nt, synthetic construct
  source 1..20: mol_type = other RNA
  ncRNA 1..20: ncRNA_class = sgRNA
gagctgcctccaccagacct

SEQ ID NO: 2177 - RNA, 20 nt, synthetic construct
  source 1..20: mol_type = other RNA
  ncRNA 1..20: ncRNA_class = sgRNA
gtgtgagaaccaaggtctgg

SEQ ID NO: 2178 - RNA, 20 nt, synthetic construct
  source 1..20: mol_type = other RNA
  ncRNA 1..20: ncRNA_class = sgRNA
cagcacagaacattcccggc

SEQ ID NO: 2179 - RNA, 20 nt, synthetic construct
  source 1..20: mol_type = other RNA
  ncRNA 1..20: ncRNA_class = sgRNA
ggcactgaagccgagctcaa

SEQ ID NO: 2180 - RNA, 20 nt, synthetic construct
  source 1..20: mol_type = other RNA
  ncRNA 1..20: ncRNA_class = sgRNA
gctcggcttcagtgccaggc

SEQ ID NO: 2181 - RNA, 20 nt, synthetic construct
  source 1..20: mol_type = other RNA
  ncRNA 1..20: ncRNA_class = sgRNA
caggcagcacagaacattcc

SEQ ID NO: 2182 - RNA, 20 nt, synthetic construct
  source 1..20: mol_type = other RNA
  ncRNA 1..20: ncRNA_class = sgRNA
agctcggcttcagtgccagg

SEQ ID NO: 2183 - RNA, 20 nt, synthetic construct
  source 1..20: mol_type = other RNA
  ncRNA 1..20: ncRNA_class = sgRNA
ggaggtattctggaagtgcc

SEQ ID NO: 2184 - RNA, 20 nt, synthetic construct
  source 1..20: mol_type = other RNA
  ncRNA 1..20: ncRNA_class = sgRNA
tttgcaggttgtgtcggact

SEQ ID NO: 2185 - RNA, 20 nt, synthetic construct
  source 1..20: mol_type = other RNA
  ncRNA 1..20: ncRNA_class = sgRNA
gtgtcggactgggcagtgcc

SEQ ID NO: 2186 - RNA, 20 nt, synthetic construct
  source 1..20: mol_type = other RNA
  ncRNA 1..20: ncRNA_class = sgRNA
caaccactgcgtcccctgca

SEQ ID NO: 2187 - RNA, 20 nt, synthetic construct
  source 1..20: mol_type = other RNA
  ncRNA 1..20: ncRNA_class = sgRNA
ctactttctgactgcccgcc

SEQ ID NO: 2188 - RNA, 20 nt, synthetic construct
  source 1..20: mol_type = other RNA
  ncRNA 1..20: ncRNA_class = sgRNA
actgcgtcccctgcaaggcc

SEQ ID NO: 2189 - RNA, 20 nt, synthetic construct
  source 1..20: mol_type = other RNA
  ncRNA 1..20: ncRNA_class = sgRNA
caggtgtgagaaccaaggtc

SEQ ID NO: 2190 - RNA, 20 nt, synthetic construct
  source 1..20: mol_type = other RNA
  ncRNA 1..20: ncRNA_class = sgRNA
ggaagtgcccggccttgcag

SEQ ID NO: 2191 - RNA, 20 nt, synthetic construct
  source 1..20: mol_type = other RNA
  ncRNA 1..20: ncRNA_class = sgRNA
ttgagctcggcttcagtgcc

SEQ ID NO: 2192 - RNA, 20 nt, synthetic construct
  source 1..20: mol_type = other RNA
  ncRNA 1..20: ncRNA_class = sgRNA
cggccttgcaggggacgcag

SEQ ID NO: 2193 - RNA, 20 nt, synthetic construct
  source 1..20: mol_type = other RNA
  ncRNA 1..20: ncRNA_class = sgRNA
tggctctaatggatttttgc

SEQ ID NO: 2194 - RNA, 20 nt, synthetic construct
  source 1..20: mol_type = other RNA
  ncRNA 1..20: ncRNA_class = sgRNA
gacccagtgccgctgccagc

SEQ ID NO: 2195 - RNA, 20 nt, synthetic construct
  source 1..20: mol_type = other RNA
  ncRNA 1..20: ncRNA_class = sgRNA
acccagtgccgctgccagcc

SEQ ID NO: 2196 - RNA, 20 nt, synthetic construct
  source 1..20: mol_type = other RNA
  ncRNA 1..20: ncRNA_class = sgRNA
gggaatgttctgtgctgcct

SEQ ID NO: 2197 - RNA, 20 nt, synthetic construct
  source 1..20: mol_type = other RNA
  ncRNA 1..20: ncRNA_class = sgRNA
tggatttttgcaggttgtgt

SEQ ID NO: 2198 - RNA, 20 nt, synthetic construct
  source 1..20: mol_type = other RNA
  ncRNA 1..20: ncRNA_class = sgRNA
cgggaatgttctgtgctgcc

SEQ ID NO: 2199 - RNA, 20 nt, synthetic construct
  source 1..20: mol_type = other RNA
  ncRNA 1..20: ncRNA_class = sgRNA
agaacattcccggctggcag

SEQ ID NO: 2200 - RNA, 20 nt, synthetic construct
  source 1..20: mol_type = other RNA
  ncRNA 1..20: ncRNA_class = sgRNA
ctggaagtgcccggccttgc

SEQ ID NO: 2201 - RNA, 20 nt, synthetic construct
  source 1..20: mol_type = other RNA
  ncRNA 1..20: ncRNA_class = sgRNA
gggctggcagcgggcgctgg

SEQ ID NO: 2202 - RNA, 20 nt, synthetic construct
  source 1..20: mol_type = other RNA
  ncRNA 1..20: ncRNA_class = sgRNA
tgagaaccaaggtctggtgg

SEQ ID NO: 2203 - RNA, 20 nt, synthetic construct
  source 1..20: mol_type = other RNA
  ncRNA 1..20: ncRNA_class = sgRNA
ttttgcaggttgtgtcggac

SEQ ID NO: 2204 - RNA, 20 nt, synthetic construct
  source 1..20: mol_type = other RNA
  ncRNA 1..20: ncRNA_class = sgRNA
ggtctggtggaggcagctcc

SEQ ID NO: 2205 - RNA, 20 nt, synthetic construct
  source 1..20: mol_type = other RNA
  ncRNA 1..20: ncRNA_class = sgRNA
cgctgggggaggaggtattc

SEQ ID NO: 2206 - RNA, 20 nt, synthetic construct
  source 1..20: mol_type = other RNA
  ncRNA 1..20: ncRNA_class = sgRNA
tggggctggcagcgggcgct

SEQ ID NO: 2207 - RNA, 20 nt, synthetic construct
  source 1..20: mol_type = other RNA
  ncRNA 1..20: ncRNA_class = sgRNA
cccgctgccagccccacacc

SEQ ID NO: 2208 - RNA, 20 nt, synthetic construct
  source 1..20: mol_type = other RNA
  ncRNA 1..20: ncRNA_class = sgRNA
cactgcgtcccctgcaaggc

SEQ ID NO: 2209 - RNA, 20 nt, synthetic construct
  source 1..20: mol_type = other RNA
  ncRNA 1..20: ncRNA_class = sgRNA
cctggtgtggggctggcagc

SEQ ID NO: 2210 - RNA, 20 nt, synthetic construct
  source 1..20: mol_type = other RNA
  ncRNA 1..20: ncRNA_class = sgRNA
acctggtgtggggctggcag

SEQ ID NO: 2211 - RNA, 20 nt, synthetic construct
  source 1..20: mol_type = other RNA
  ncRNA 1..20: ncRNA_class = sgRNA
gtggggctggcagcgggcgc

SEQ ID NO: 2212 - RNA, 20 nt, synthetic construct
  source 1..20: mol_type = other RNA
  ncRNA 1..20: ncRNA_class = sgRNA
ggggctggcagcgggcgctg

SEQ ID NO: 2213 - RNA, 20 nt, synthetic construct
  source 1..20: mol_type = other RNA
  ncRNA 1..20: ncRNA_class = sgRNA
ctggcagcgggcgctggggg

SEQ ID NO: 2214 - RNA, 20 nt, synthetic construct
  source 1..20: mol_type = other RNA
  ncRNA 1..20: ncRNA_class = sgRNA
caatcctgtagctggaagct

SEQ ID NO: 2215 - RNA, 20 nt, synthetic construct
  source 1..20: mol_type = other RNA
  ncRNA 1..20: ncRNA_class = sgRNA
aagtatggatgggccttcgg

SEQ ID NO: 2216 - RNA, 20 nt, synthetic construct
  source 1..20: mol_type = other RNA
  ncRNA 1..20: ncRNA_class = sgRNA
caagtcagggaagtatggat

SEQ ID NO: 2217 - RNA, 20 nt, synthetic construct
  source 1..20: mol_type = other RNA
  ncRNA 1..20: ncRNA_class = sgRNA
gcagtggctgtaccaagtca

SEQ ID NO: 2218 - RNA, 20 nt, synthetic construct
  source 1..20: mol_type = other RNA
  ncRNA 1..20: ncRNA_class = sgRNA
cctccaaaactggggctgcg

SEQ ID NO: 2219 - RNA, 20 nt, synthetic construct
  source 1..20: mol_type = other RNA
  ncRNA 1..20: ncRNA_class = sgRNA
gagtcctctggacctgacca

SEQ ID NO: 2220 - RNA, 20 nt, synthetic construct
  source 1..20: mol_type = other RNA
  ncRNA 1..20: ncRNA_class = sgRNA
accaatggcattcatgtcac

SEQ ID NO: 2221 - RNA, 20 nt, synthetic construct
  source 1..20: mol_type = other RNA
  ncRNA 1..20: ncRNA_class = sgRNA
agtgatagtcatagacccgc

SEQ ID NO: 2222 - RNA, 20 nt, synthetic construct
  source 1..20: mol_type = other RNA
  ncRNA 1..20: ncRNA_class = sgRNA
tctacaatggaccagtactg

SEQ ID NO: 2223 - RNA, 20 nt, synthetic construct
  source 1..20: mol_type = other RNA
  ncRNA 1..20: ncRNA_class = sgRNA
aatggggtatggaggttcgg

SEQ ID NO: 2224 - RNA, 20 nt, synthetic construct
  source 1..20: mol_type = other RNA
  ncRNA 1..20: ncRNA_class = sgRNA
gaatggggtatggaggttcg

SEQ ID NO: 2225 - RNA, 20 nt, synthetic construct
  source 1..20: mol_type = other RNA
  ncRNA 1..20: ncRNA_class = sgRNA
aatggcattcatgtcaccgg

SEQ ID NO: 2226 - RNA, 20 nt, synthetic construct
  source 1..20: mol_type = other RNA
  ncRNA 1..20: ncRNA_class = sgRNA
ataccccattcccgaagagg

SEQ ID NO: 2227 - RNA, 20 nt, synthetic construct
  source 1..20: mol_type = other RNA
  ncRNA 1..20: ncRNA_class = sgRNA
tacaatggaccagtactggg

SEQ ID NO: 2228 - RNA, 20 nt, synthetic construct
  source 1..20: mol_type = other RNA
  ncRNA 1..20: ncRNA_class = sgRNA
tcttcgggaatggggtatgg

SEQ ID NO: 2229 - RNA, 20 nt, synthetic construct
  source 1..20: mol_type = other RNA
  ncRNA 1..20: ncRNA_class = sgRNA
gggaagtatggatgggcctt

SEQ ID NO: 2230 - RNA, 20 nt, synthetic construct
  source 1..20: mol_type = other RNA
  ncRNA 1..20: ncRNA_class = sgRNA
atgtttccccagtatccact

SEQ ID NO: 2231 - RNA, 20 nt, synthetic construct
  source 1..20: mol_type = other RNA
  ncRNA 1..20: ncRNA_class = sgRNA
ggggagcccagtggatactg

SEQ ID NO: 2232 - RNA, 20 nt, synthetic construct
  source 1..20: mol_type = other RNA
  ncRNA 1..20: ncRNA_class = sgRNA
ggagccgcagttggaacccg

SEQ ID NO: 2233 - RNA, 20 nt, synthetic construct
  source 1..20: mol_type = other RNA
  ncRNA 1..20: ncRNA_class = sgRNA
gaggttcgggggtagctggg

SEQ ID NO: 2234 - RNA, 20 nt, synthetic construct
  source 1..20: mol_type = other RNA
  ncRNA 1..20: ncRNA_class = sgRNA
agcagtggctgtaccaagtc

SEQ ID NO: 2235 - RNA, 20 nt, synthetic construct
  source 1..20: mol_type = other RNA
  ncRNA 1..20: ncRNA_class = sgRNA
cataccccattcccgaagag

SEQ ID NO: 2236 - RNA, 20 nt, synthetic construct
  source 1..20: mol_type = other RNA
  ncRNA 1..20: ncRNA_class = sgRNA
tgctccccgggttccaactg

SEQ ID NO: 2237 - RNA, 20 nt, synthetic construct
  source 1..20: mol_type = other RNA
  ncRNA 1..20: ncRNA_class = sgRNA
ggggaaacatctccagaaat

SEQ ID NO: 2238 - RNA, 20 nt, synthetic construct
  source 1..20: mol_type = other RNA
  ncRNA 1..20: ncRNA_class = sgRNA
ggggtgtagagagcccggga

SEQ ID NO: 2239 - RNA, 20 nt, synthetic construct
  source 1..20: mol_type = other RNA
  ncRNA 1..20: ncRNA_class = sgRNA
gggaggtctccaggacccgg

SEQ ID NO: 2240 - RNA, 20 nt, synthetic construct
  source 1..20: mol_type = other RNA
  ncRNA 1..20: ncRNA_class = sgRNA
tggggtgtagagagcccggg

SEQ ID NO: 2241 - RNA, 20 nt, synthetic construct
  source 1..20: mol_type = other RNA
  ncRNA 1..20: ncRNA_class = sgRNA
ccaagtcagggaagtatgga

SEQ ID NO: 2242 - RNA, 20 nt, synthetic construct
  source 1..20: mol_type = other RNA
  ncRNA 1..20: ncRNA_class = sgRNA
tccataccccattcccgaag

SEQ ID NO: 2243 - RNA, 20 nt, synthetic construct
  source 1..20: mol_type = other RNA
  ncRNA 1..20: ncRNA_class = sgRNA
ctggtggggtgtagagagcc

SEQ ID NO: 2244 - RNA, 20 nt, synthetic construct
  source 1..20: mol_type = other RNA
  ncRNA 1..20: ncRNA_class = sgRNA
tggtggggtgtagagagccc

SEQ ID NO: 2245 - RNA, 20 nt, synthetic construct
  source 1..20: mol_type = other RNA
  ncRNA 1..20: ncRNA_class = sgRNA
ccataccccattcccgaaga

SEQ ID NO: 2246 - RNA, 20 nt, synthetic construct
  source 1..20: mol_type = other RNA
  ncRNA 1..20: ncRNA_class = sgRNA
ggtccccctcttcgggaatg

SEQ ID NO: 2247 - RNA, 20 nt, synthetic construct
  source 1..20: mol_type = other RNA
  ncRNA 1..20: ncRNA_class = sgRNA
agccttgccatcttcctggt

SEQ ID NO: 2248 - RNA, 20 nt, synthetic construct
  source 1..20: mol_type = other RNA
  ncRNA 1..20: ncRNA_class = sgRNA
gccggtgacatgaatgccat

SEQ ID NO: 2249 - RNA, 20 nt, synthetic construct
  source 1..20: mol_type = other RNA
  ncRNA 1..20: ncRNA_class = sgRNA
tgtaccaagtcagggaagta

SEQ ID NO: 2250 - RNA, 20 nt, synthetic construct
  source 1..20: mol_type = other RNA
  ncRNA 1..20: ncRNA_class = sgRNA
atggcattcatgtcaccggc

SEQ ID NO: 2251 - RNA, 20 nt, synthetic construct
  source 1..20: mol_type = other RNA
  ncRNA 1..20: ncRNA_class = sgRNA
tctacaccccaccaggaaga

SEQ ID NO: 2252 - RNA, 20 nt, synthetic construct
  source 1..20: mol_type = other RNA
  ncRNA 1..20: ncRNA_class = sgRNA
gagcagagccaggtggccca

SEQ ID NO: 2253 - RNA, 20 nt, synthetic construct
  source 1..20: mol_type = other RNA
  ncRNA 1..20: ncRNA_class = sgRNA
ccaatcctgtagctggaagc

SEQ ID NO: 2254 - RNA, 20 nt, synthetic construct
  source 1..20: mol_type = other RNA
  ncRNA 1..20: ncRNA_class = sgRNA
ccagcttccagctacaggat

SEQ ID NO: 2255 - RNA, 20 nt, synthetic construct
  source 1..20: mol_type = other RNA
  ncRNA 1..20: ncRNA_class = sgRNA
agggagccgcagttggaacc

SEQ ID NO: 2256 - RNA, 20 nt, synthetic construct
  source 1..20: mol_type = other RNA
  ncRNA 1..20: ncRNA_class = sgRNA
atggaggttcgggggtagct

SEQ ID NO: 2257 - RNA, 20 nt, synthetic construct
  source 1..20: mol_type = other RNA
  ncRNA 1..20: ncRNA_class = sgRNA
cgggctctctacaccccacc

SEQ ID NO: 2258 - RNA, 20 nt, synthetic construct
  source 1..20: mol_type = other RNA
  ncRNA 1..20: ncRNA_class = sgRNA
ggaatggggtatggaggttc

SEQ ID NO: 2259 - RNA, 20 nt, synthetic construct
  source 1..20: mol_type = other RNA
  ncRNA 1..20: ncRNA_class = sgRNA
agagtcctctggacctgacc

SEQ ID NO: 2260 - RNA, 20 nt, synthetic construct
  source 1..20: mol_type = other RNA
  ncRNA 1..20: ncRNA_class = sgRNA
gggttccaactgcggctccc

SEQ ID NO: 2261 - RNA, 20 nt, synthetic construct
  source 1..20: mol_type = other RNA
  ncRNA 1..20: ncRNA_class = sgRNA
ggcgggtctatgactatcac

SEQ ID NO: 2262 - RNA, 20 nt, synthetic construct
  source 1..20: mol_type = other RNA
  ncRNA 1..20: ncRNA_class = sgRNA
gccttgccatcttcctggtg

SEQ ID NO: 2263 - RNA, 20 nt, synthetic construct
  source 1..20: mol_type = other RNA
  ncRNA 1..20: ncRNA_class = sgRNA
gctgctcaagaggcgtccgc

SEQ ID NO: 2264 - RNA, 20 nt, synthetic construct
  source 1..20: mol_type = other RNA
  ncRNA 1..20: ncRNA_class = sgRNA
atctacaatggaccagtact

SEQ ID NO: 2265 - RNA, 20 nt, synthetic construct
  source 1..20: mol_type = other RNA
  ncRNA 1..20: ncRNA_class = sgRNA
tggaagctgggagcctccga

SEQ ID NO: 2266 - RNA, 20 nt, synthetic construct
  source 1..20: mol_type = other RNA
  ncRNA 1..20: ncRNA_class = sgRNA
agggtggctcttccagatgc

SEQ ID NO: 2267 - RNA, 20 nt, synthetic construct
  source 1..20: mol_type = other RNA
  ncRNA 1..20: ncRNA_class = sgRNA
agggtccccctcttcgggaa

SEQ ID NO: 2268 - RNA, 20 nt, synthetic construct
  source 1..20: mol_type = other RNA
  ncRNA 1..20: ncRNA_class = sgRNA
ctacaatggaccagtactgg

SEQ ID NO: 2269 - RNA, 20 nt, synthetic construct
  source 1..20: mol_type = other RNA
  ncRNA 1..20: ncRNA_class = sgRNA
ccccgcagccccagttttgg

SEQ ID NO: 2270 - RNA, 20 nt, synthetic construct
  source 1..20: mol_type = other RNA
  ncRNA 1..20: ncRNA_class = sgRNA
ggcaacatctacatctacaa

SEQ ID NO: 2271 - RNA, 20 nt, synthetic construct
  source 1..20: mol_type = other RNA
  ncRNA 1..20: ncRNA_class = sgRNA
cagcttccagctacaggatt

SEQ ID NO: 2272 - RNA, 20 nt, synthetic construct
  source 1..20: mol_type = other RNA
  ncRNA 1..20: ncRNA_class = sgRNA
attcccgaagagggggaccc

SEQ ID NO: 2273 - RNA, 20 nt, synthetic construct
  source 1..20: mol_type = other RNA
  ncRNA 1..20: ncRNA_class = sgRNA
ccttctctctgcaggaaact

SEQ ID NO: 2274 - RNA, 20 nt, synthetic construct
  source 1..20: mol_type = other RNA
  ncRNA 1..20: ncRNA_class = sgRNA
cctgaccagggagccgcagt

SEQ ID NO: 2275 - RNA, 20 nt, synthetic construct
  source 1..20: mol_type = other RNA
  ncRNA 1..20: ncRNA_class = sgRNA
gagggacccaatcctgtagc

SEQ ID NO: 2276 - RNA, 20 nt, synthetic construct
  source 1..20: mol_type = other RNA
  ncRNA 1..20: ncRNA_class = sgRNA
cggggagcccagtggatact

SEQ ID NO: 2277 - RNA, 20 nt, synthetic construct
  source 1..20: mol_type = other RNA
  ncRNA 1..20: ncRNA_class = sgRNA
accccaccaggaagatggca

SEQ ID NO: 2278 - RNA, 20 nt, synthetic construct
  source 1..20: mol_type = other RNA
  ncRNA 1..20: ncRNA_class = sgRNA
gggagccgcagttggaaccc

SEQ ID NO: 2279 - RNA, 20 nt, synthetic construct
  source 1..20: mol_type = other RNA
  ncRNA 1..20: ncRNA_class = sgRNA
ggggtagctgggaggtctcc

SEQ ID NO: 2280 - RNA, 20 nt, synthetic construct
  source 1..20: mol_type = other RNA
  ncRNA 1..20: ncRNA_class = sgRNA
cccggtggtccccccagtac

SEQ ID NO: 2281 - RNA, 20 nt, synthetic construct
  source 1..20: mol_type = other RNA
  ncRNA 1..20: ncRNA_class = sgRNA
tctccagaaatgggtagcag

SEQ ID NO: 2282 - RNA, 20 nt, synthetic construct
  source 1..20: mol_type = other RNA
  ncRNA 1..20: ncRNA_class = sgRNA
ccagtttcctgcagagagaa

SEQ ID NO: 2283 - RNA, 20 nt, synthetic construct
  source 1..20: mol_type = other RNA
  ncRNA 1..20: ncRNA_class = sgRNA
accagtactggggggaccac

SEQ ID NO: 2284 - RNA, 20 nt, synthetic construct
  source 1..20: mol_type = other RNA
  ncRNA 1..20: ncRNA_class = sgRNA
gcggggagcccagtggatac

SEQ ID NO: 2285 - RNA, 20 nt, synthetic construct
  source 1..20: mol_type = other RNA
  ncRNA 1..20: ncRNA_class = sgRNA
gctgggaggtctccaggacc

SEQ ID NO: 2286 - RNA, 20 nt, synthetic construct
  source 1..20: mol_type = other RNA
  ncRNA 1..20: ncRNA_class = sgRNA
gatgtttccccagtatccac

SEQ ID NO: 2287 - RNA, 20 nt, synthetic construct
  source 1..20: mol_type = other RNA
  ncRNA 1..20: ncRNA_class = sgRNA
cagccactgctacccatttc

SEQ ID NO: 2288 - RNA, 20 nt, synthetic construct
  source 1..20: mol_type = other RNA
  ncRNA 1..20: ncRNA_class = sgRNA
gggtccccctcttcgggaat

SEQ ID NO: 2289 - RNA, 20 nt, synthetic construct
  source 1..20: mol_type = other RNA
  ncRNA 1..20: ncRNA_class = sgRNA
tatggaggttcgggggtagc

SEQ ID NO: 2290 - RNA, 20 nt, synthetic construct
  source 1..20: mol_type = other RNA
  ncRNA 1..20: ncRNA_class = sgRNA
tccagaggactctgctgttg

SEQ ID NO: 2291 - RNA, 20 nt, synthetic construct
  source 1..20: mol_type = other RNA
  ncRNA 1..20: ncRNA_class = sgRNA
tggggctgcggggagcccag

SEQ ID NO: 2292 - RNA, 20 nt, synthetic construct
  source 1..20: mol_type = other RNA
  ncRNA 1..20: ncRNA_class = sgRNA
ccatccatacttccctgact

SEQ ID NO: 2293 - RNA, 20 nt, synthetic construct
  source 1..20: mol_type = other RNA
  ncRNA 1..20: ncRNA_class = sgRNA
agggccagggtccccctctt

SEQ ID NO: 2294 - RNA, 20 nt, synthetic construct
  source 1..20: mol_type = other RNA
  ncRNA 1..20: ncRNA_class = sgRNA
tggggaaacatctccagaaa

SEQ ID NO: 2295 - RNA, 20 nt, synthetic construct
  source 1..20: mol_type = other RNA
  ncRNA 1..20: ncRNA_class = sgRNA
gcacccctgcctccaaaact

SEQ ID NO: 2296 - RNA, 20 nt, synthetic construct
  source 1..20: mol_type = other RNA
  ncRNA 1..20: ncRNA_class = sgRNA
ccagtactggggggaccacc

SEQ ID NO: 2297 - RNA, 20 nt, synthetic construct
  source 1..20: mol_type = other RNA
  ncRNA 1..20: ncRNA_class = sgRNA
gggaatggggtatggaggtt

SEQ ID NO: 2298 - RNA, 20 nt, synthetic construct
  source 1..20: mol_type = other RNA
  ncRNA 1..20: ncRNA_class = sgRNA
cccagtttcctgcagagaga

SEQ ID NO: 2299 - RNA, 20 nt, synthetic construct
  source 1..20: mol_type = other RNA
  ncRNA 1..20: ncRNA_class = sgRNA
gtttcctgcagagagaaggg

SEQ ID NO: 2300 - RNA, 20 nt, synthetic construct
  source 1..20: mol_type = other RNA
  ncRNA 1..20: ncRNA_class = sgRNA
cagccccagttttggaggca

SEQ ID NO: 2301 - RNA, 20 nt, synthetic construct
  source 1..20: mol_type = other RNA
  ncRNA 1..20: ncRNA_class = sgRNA
agggggaccctggccctccc

SEQ ID NO: 2302 - RNA, 20 nt, synthetic construct
  source 1..20: mol_type = other RNA
  ncRNA 1..20: ncRNA_class = sgRNA
ccctcttcgggaatggggta

SEQ ID NO: 2303 - RNA, 20 nt, synthetic construct
  source 1..20: mol_type = other RNA
  ncRNA 1..20: ncRNA_class = sgRNA
gccgcaacagcagagtcctc

SEQ ID NO: 2304 - RNA, 20 nt, synthetic construct
  source 1..20: mol_type = other RNA
  ncRNA 1..20: ncRNA_class = sgRNA
ccaactgcggctccctggtc

SEQ ID NO: 2305 - RNA, 20 nt, synthetic construct
  source 1..20: mol_type = other RNA
  ncRNA 1..20: ncRNA_class = sgRNA
ctggggggaccaccgggtcc

SEQ ID NO: 2306 - RNA, 20 nt, synthetic construct
  source 1..20: mol_type = other RNA
  ncRNA 1..20: ncRNA_class = sgRNA
tagagagcccgggagggcca

SEQ ID NO: 2307 - RNA, 20 nt, synthetic construct
  source 1..20: mol_type = other RNA
  ncRNA 1..20: ncRNA_class = sgRNA
aagccttgccatcttcctgg

SEQ ID NO: 2308 - RNA, 20 nt, synthetic construct
  source 1..20: mol_type = other RNA
  ncRNA 1..20: ncRNA_class = sgRNA
ggctccctggtcaggtccag

SEQ ID NO: 2309 - RNA, 20 nt, synthetic construct
  source 1..20: mol_type = other RNA
  ncRNA 1..20: ncRNA_class = sgRNA
catctacaatggaccagtac

SEQ ID NO: 2310 - RNA, 20 nt, synthetic construct
  source 1..20: mol_type = other RNA
  ncRNA 1..20: ncRNA_class = sgRNA
gctccccgcagccccagttt

SEQ ID NO: 2311 - RNA, 20 nt, synthetic construct
  source 1..20: mol_type = other RNA
  ncRNA 1..20: ncRNA_class = sgRNA
ggccacctggctctgctccc

SEQ ID NO: 2312 - RNA, 20 nt, synthetic construct
  source 1..20: mol_type = other RNA
  ncRNA 1..20: ncRNA_class = sgRNA
ggctcccagcttccagctac

SEQ ID NO: 2313 - RNA, 20 nt, synthetic construct
  source 1..20: mol_type = other RNA
  ncRNA 1..20: ncRNA_class = sgRNA
gtagagagcccgggagggcc

SEQ ID NO: 2314 - RNA, 20 nt, synthetic construct
  source 1..20: mol_type = other RNA
  ncRNA 1..20: ncRNA_class = sgRNA
gccaagccttgccatcttcc

SEQ ID NO: 2315 - RNA, 20 nt, synthetic construct
  source 1..20: mol_type = other RNA
  ncRNA 1..20: ncRNA_class = sgRNA
agagccacccttctctctgc

SEQ ID NO: 2316 - RNA, 20 nt, synthetic construct
  source 1..20: mol_type = other RNA
  ncRNA 1..20: ncRNA_class = sgRNA
gcctccaaaactggggctgc

SEQ ID NO: 2317 - RNA, 20 nt, synthetic construct
  source 1..20: mol_type = other RNA
  ncRNA 1..20: ncRNA_class = sgRNA
gccacctggctctgctcccc

SEQ ID NO: 2318 - RNA, 20 nt, synthetic construct
  source 1..20: mol_type = other RNA
  ncRNA 1..20: ncRNA_class = sgRNA
gggccagggtccccctcttc

SEQ ID NO: 2319 - RNA, 20 nt, synthetic construct
  source 1..20: mol_type = other RNA
  ncRNA 1..20: ncRNA_class = sgRNA
tgcctccaaaactggggctg

SEQ ID NO: 2320 - RNA, 20 nt, synthetic construct
  source 1..20: mol_type = other RNA
  ncRNA 1..20: ncRNA_class = sgRNA
gagggggaccctggccctcc

SEQ ID NO: 2321 - RNA, 20 nt, synthetic construct
  source 1..20: mol_type = other RNA
  ncRNA 1..20: ncRNA_class = sgRNA
gcagccccagttttggaggc

SEQ ID NO: 2322 - RNA, 20 nt, synthetic construct
  source 1..20: mol_type = other RNA
  ncRNA 1..20: ncRNA_class = sgRNA
cccttctctctgcaggaaac

SEQ ID NO: 2323 - RNA, 20 nt, synthetic construct
  source 1..20: mol_type = other RNA
  ncRNA 1..20: ncRNA_class = sgRNA
cagaacggccagcatcagca

SEQ ID NO: 2324 - RNA, 20 nt, synthetic construct
  source 1..20: mol_type = other RNA
  ncRNA 1..20: ncRNA_class = sgRNA
ccactgcccccagagatgtc

SEQ ID NO: 2325 - RNA, 20 nt, synthetic construct
  source 1..20: mol_type = other RNA
  ncRNA 1..20: ncRNA_class = sgRNA
gaaggccagtggcagcagaa

SEQ ID NO: 2326 - RNA, 20 nt, synthetic construct
  source 1..20: mol_type = other RNA
  ncRNA 1..20: ncRNA_class = sgRNA
gctggccgttctgctgccac

SEQ ID NO: 2327 - RNA, 20 nt, synthetic construct
  source 1..20: mol_type = other RNA
  ncRNA 1..20: ncRNA_class = sgRNA
cctgacatctctgggggcag

SEQ ID NO: 2328 - RNA, 20 nt, synthetic construct
  source 1..20: mol_type = other RNA
  ncRNA 1..20: ncRNA_class = sgRNA
tctgggggcagtggctctaa

SEQ ID NO: 2329 - RNA, 20 nt, synthetic construct
  source 1..20: mol_type = other RNA
  ncRNA 1..20: ncRNA_class = sgRNA
ctagcggagacagagcactg

SEQ ID NO: 2330 - RNA, 20 nt, synthetic construct
  source 1..20: mol_type = other RNA
  ncRNA 1..20: ncRNA_class = sgRNA
ggtgccacaccctctaacag

SEQ ID NO: 2331 - RNA, 20 nt, synthetic construct
  source 1..20: mol_type = other RNA
  ncRNA 1..20: ncRNA_class = sgRNA
tggtgccacaccctctaaca

SEQ ID NO: 2332 - RNA, 20 nt, synthetic construct
  source 1..20: mol_type = other RNA
  ncRNA 1..20: ncRNA_class = sgRNA
gtggtgccacaccctctaac

SEQ ID NO: 2333 - RNA, 20 nt, synthetic construct
  source 1..20: mol_type = other RNA
  ncRNA 1..20: ncRNA_class = sgRNA
tggcaaggcttggcacctag

SEQ ID NO: 2334 - RNA, 20 nt, synthetic construct
  source 1..20: mol_type = other RNA
  ncRNA 1..20: ncRNA_class = sgRNA
cacagtgctctgtctccgct

SEQ ID NO: 2335 - RNA, 20 nt, synthetic construct
  source 1..20: mol_type = other RNA
  ncRNA 1..20: ncRNA_class = sgRNA
gggtgataaattggttcctt

SEQ ID NO: 2336 - RNA, 20 nt, synthetic construct
  source 1..20: mol_type = other RNA
  ncRNA 1..20: ncRNA_class = sgRNA
tgggtgataaattggttcct

SEQ ID NO: 2337 - RNA, 20 nt, synthetic construct
  source 1..20: mol_type = other RNA
  ncRNA 1..20: ncRNA_class = sgRNA
tgggcccctgttagagggtg

SEQ ID NO: 2338 - RNA, 20 nt, synthetic construct
  source 1..20: mol_type = other RNA
  ncRNA 1..20: ncRNA_class = sgRNA
gtcagtcatgggtgataaat

SEQ ID NO: 2339 - RNA, 20 nt, synthetic construct
  source 1..20: mol_type = other RNA
  ncRNA 1..20: ncRNA_class = sgRNA
gttccttgggcccctgttag

SEQ ID NO: 2340 - RNA, 20 nt, synthetic construct
  source 1..20: mol_type = other RNA
  ncRNA 1..20: ncRNA_class = sgRNA
caccctctaacaggggccca

SEQ ID NO: 2341 - RNA, 20 nt, synthetic construct
  source 1..20: mol_type = other RNA
  ncRNA 1..20: ncRNA_class = sgRNA
ttccttgggcccctgttaga

SEQ ID NO: 2342 - RNA, 20 nt, synthetic construct
  source 1..20: mol_type = other RNA
  ncRNA 1..20: ncRNA_class = sgRNA
accaggaagatggcaaggct

SEQ ID NO: 2343 - RNA, 20 nt, synthetic construct
  source 1..20: mol_type = other RNA
  ncRNA 1..20: ncRNA_class = sgRNA
gcagagccgcacacggcccg

SEQ ID NO: 2344 - RNA, 20 nt, synthetic construct
  source 1..20: mol_type = other RNA
  ncRNA 1..20: ncRNA_class = sgRNA
gctgggccgcgggccgtgtg

SEQ ID NO: 2345 - RNA, 20 nt, synthetic construct
  source 1..20: mol_type = other RNA
  ncRNA 1..20: ncRNA_class = sgRNA
aggaggagcagagccgcaca

SEQ ID NO: 2346 - RNA, 20 nt, synthetic construct
  source 1..20: mol_type = other RNA
  ncRNA 1..20: ncRNA_class = sgRNA
gacacagtggagccccgtca

SEQ ID NO: 2347 - RNA, 20 nt, synthetic construct
  source 1..20: mol_type = other RNA
  ncRNA 1..20: ncRNA_class = sgRNA
ggtaggtgtccccgacacag

SEQ ID NO: 2348 - RNA, 20 nt, synthetic construct
  source 1..20: mol_type = other RNA
  ncRNA 1..20: ncRNA_class = sgRNA
gacggggctccactgtgtcg

SEQ ID NO: 2349 - RNA, 20 nt, synthetic construct
  source 1..20: mol_type = other RNA
  ncRNA 1..20: ncRNA_class = sgRNA
ctgcagccgctcccagaaca

SEQ ID NO: 2350 - RNA, 20 nt, synthetic construct
  source 1..20: mol_type = other RNA
  ncRNA 1..20: ncRNA_class = sgRNA
aacacggtgtgccgtccgtg

SEQ ID NO: 2351 - RNA, 20 nt, synthetic construct
  source 1..20: mol_type = other RNA
  ncRNA 1..20: ncRNA_class = sgRNA
agaagcccggcccgcacgga

SEQ ID NO: 2352 - RNA, 20 nt, synthetic construct
  source 1..20: mol_type = other RNA
  ncRNA 1..20: ncRNA_class = sgRNA
acacggtgtgccgtccgtgc

SEQ ID NO: 2353 - RNA, 20 nt, synthetic construct
  source 1..20: mol_type = other RNA
  ncRNA 1..20: ncRNA_class = sgRNA
ttgtagaagcccggcccgca

SEQ ID NO: 2354 - RNA, 20 nt, synthetic construct
  source 1..20: mol_type = other RNA
  ncRNA 1..20: ncRNA_class = sgRNA
ctgaggttacaccacgtgca

SEQ ID NO: 2355 - RNA, 20 nt, synthetic construct
  source 1..20: mol_type = other RNA
  ncRNA 1..20: ncRNA_class = sgRNA
tgagcggaagcagctgtgca

SEQ ID NO: 2356 - RNA, 20 nt, synthetic construct
  source 1..20: mol_type = other RNA
  ncRNA 1..20: ncRNA_class = sgRNA
gcggcagactgtgtcctgtg

SEQ ID NO: 2357 - RNA, 20 nt, synthetic construct
  source 1..20: mol_type = other RNA
  ncRNA 1..20: ncRNA_class = sgRNA
ccaggcttgtagctgtccag

SEQ ID NO: 2358 - RNA, 20 nt, synthetic construct
  source 1..20: mol_type = other RNA
  ncRNA 1..20: ncRNA_class = sgRNA
tccaggcttgtagctgtcca

SEQ ID NO: 2359 - RNA, 20 nt, synthetic construct
  source 1..20: mol_type = other RNA
  ncRNA 1..20: ncRNA_class = sgRNA
cccctggacagctacaagcc

SEQ ID NO: 2360 - RNA, 20 nt, synthetic construct
  source 1..20: mol_type = other RNA
  ncRNA 1..20: ncRNA_class = sgRNA
ctggggctgagcaccgtgac

SEQ ID NO: 2361 - RNA, 20 nt, synthetic construct
  source 1..20: mol_type = other RNA
  ncRNA 1..20: ncRNA_class = sgRNA
gtgtgccgtccgtgcgggcc

SEQ ID NO: 2362 - RNA, 20 nt, synthetic construct
  source 1..20: mol_type = other RNA
  ncRNA 1..20: ncRNA_class = sgRNA
agccgtgcaagccctgcacg

SEQ ID NO: 2363 - RNA, 20 nt, synthetic construct
  source 1..20: mol_type = other RNA
  ncRNA 1..20: ncRNA_class = sgRNA
cctggggctgagcaccgtga

SEQ ID NO: 2364 - RNA, 20 nt, synthetic construct
  source 1..20: mol_type = other RNA
  ncRNA 1..20: ncRNA_class = sgRNA
acagtctgccgctgccgggc

SEQ ID NO: 2365 - RNA, 20 nt, synthetic construct
  source 1..20: mol_type = other RNA
  ncRNA 1..20: ncRNA_class = sgRNA
accacgtcgttgtagaagcc

SEQ ID NO: 2366 - RNA, 20 nt, synthetic construct
  source 1..20: mol_type = other RNA
  ncRNA 1..20: ncRNA_class = sgRNA
tggcagcaccggtcgttgct

SEQ ID NO: 2367 - RNA, 20 nt, synthetic construct
  source 1..20: mol_type = other RNA
  ncRNA 1..20: ncRNA_class = sgRNA
gcagctgtgcacggccacac

SEQ ID NO: 2368 - RNA, 20 nt, synthetic construct
  source 1..20: mol_type = other RNA
  ncRNA 1..20: ncRNA_class = sgRNA
tggggctgagcaccgtgacg

SEQ ID NO: 2369 - RNA, 20 nt, synthetic construct
  source 1..20: mol_type = other RNA
  ncRNA 1..20: ncRNA_class = sgRNA
acacctaccccagcaacgac

SEQ ID NO: 2370 - RNA, 20 nt, synthetic construct
  source 1..20: mol_type = other RNA
  ncRNA 1..20: ncRNA_class = sgRNA
cacagtctgccgctgccggg

SEQ ID NO: 2371 - RNA, 20 nt, synthetic construct
  source 1..20: mol_type = other RNA
  ncRNA 1..20: ncRNA_class = sgRNA
cggacggcacaccgtgttct

SEQ ID NO: 2372 - RNA, 20 nt, synthetic construct
  source 1..20: mol_type = other RNA
  ncRNA 1..20: ncRNA_class = sgRNA
ggtgtgccgtccgtgcgggc

SEQ ID NO: 2373 - RNA, 20 nt, synthetic construct
  source 1..20: mol_type = other RNA
  ncRNA 1..20: ncRNA_class = sgRNA
caccacgtgcagggcttgca

SEQ ID NO: 2374 - RNA, 20 nt, synthetic construct
  source 1..20: mol_type = other RNA
  ncRNA 1..20: ncRNA_class = sgRNA
cgtgcagggcttgcacggct

SEQ ID NO: 2375 - RNA, 20 nt, synthetic construct
  source 1..20: mol_type = other RNA
  ncRNA 1..20: ncRNA_class = sgRNA
accggtgctgccacgagtgc

SEQ ID NO: 2376 - RNA, 20 nt, synthetic construct
  source 1..20: mol_type = other RNA
  ncRNA 1..20: ncRNA_class = sgRNA
gcaccggtcgttgctggggt

SEQ ID NO: 2377 - RNA, 20 nt, synthetic construct
  source 1..20: mol_type = other RNA
  ncRNA 1..20: ncRNA_class = sgRNA
ggacacagtctgccgctgcc

SEQ ID NO: 2378 - RNA, 20 nt, synthetic construct
  source 1..20: mol_type = other RNA
  ncRNA 1..20: ncRNA_class = sgRNA
acggacggcacaccgtgttc

SEQ ID NO: 2379 - RNA, 20 nt, synthetic construct
  source 1..20: mol_type = other RNA
  ncRNA 1..20: ncRNA_class = sgRNA
ccaggggctgggtgcccgcc

SEQ ID NO: 2380 - RNA, 20 nt, synthetic construct
  source 1..20: mol_type = other RNA
  ncRNA 1..20: ncRNA_class = sgRNA
actgaggttacaccacgtgc

SEQ ID NO: 2381 - RNA, 20 nt, synthetic construct
  source 1..20: mol_type = other RNA
  ncRNA 1..20: ncRNA_class = sgRNA
ctccaggcttgtagctgtcc

SEQ ID NO: 2382 - RNA, 20 nt, synthetic construct
  source 1..20: mol_type = other RNA
  ncRNA 1..20: ncRNA_class = sgRNA
ggcagcaccggtcgttgctg

SEQ ID NO: 2383 - RNA, 20 nt, synthetic construct
  source 1..20: mol_type = other RNA
  ncRNA 1..20: ncRNA_class = sgRNA
gctgggtgcccgcccggcag

SEQ ID NO: 2384 - RNA, 20 nt, synthetic construct
  source 1..20: mol_type = other RNA
  ncRNA 1..20: ncRNA_class = sgRNA
gcttgtagctgtccaggggc

SEQ ID NO: 2385 - RNA, 20 nt, synthetic construct
  source 1..20: mol_type = other RNA
  ncRNA 1..20: ncRNA_class = sgRNA
ggcacaccgtgttctgggag

SEQ ID NO: 2386 - RNA, 20 nt, synthetic construct
  source 1..20: mol_type = other RNA
  ncRNA 1..20: ncRNA_class = sgRNA
gtggcagcaccggtcgttgc

SEQ ID NO: 2387 - RNA, 20 nt, synthetic construct
  source 1..20: mol_type = other RNA
  ncRNA 1..20: ncRNA_class = sgRNA
tgtgcggctctgctcctcct

SEQ ID NO: 2388 - RNA, 20 nt, synthetic construct
  source 1..20: mol_type = other RNA
  ncRNA 1..20: ncRNA_class = sgRNA
gccgggcttctacaacgacg

SEQ ID NO: 2389 - RNA, 20 nt, synthetic construct
  source 1..20: mol_type = other RNA
  ncRNA 1..20: ncRNA_class = sgRNA
cttgtagctgtccaggggct

SEQ ID NO: 2390 - RNA, 20 nt, synthetic construct
  source 1..20: mol_type = other RNA
  ncRNA 1..20: ncRNA_class = sgRNA
ccgtcacggtgctcagcccc

SEQ ID NO: 2391 - RNA, 20 nt, synthetic construct
  source 1..20: mol_type = other RNA
  ncRNA 1..20: ncRNA_class = sgRNA
gacagctacaagcctggagt

SEQ ID NO: 2392 - RNA, 20 nt, synthetic construct
  source 1..20: mol_type = other RNA
  ncRNA 1..20: ncRNA_class = sgRNA
gggctcggcggctgggccgc

SEQ ID NO: 2393 - RNA, 20 nt, synthetic construct
  source 1..20: mol_type = other RNA
  ncRNA 1..20: ncRNA_class = sgRNA
gcctgcactcgtggcagcac

SEQ ID NO: 2394 - RNA, 20 nt, synthetic construct
  source 1..20: mol_type = other RNA
  ncRNA 1..20: ncRNA_class = sgRNA
ccgggcgggcacccagcccc

SEQ ID NO: 2395 - RNA, 20 nt, synthetic construct
  source 1..20: mol_type = other RNA
  ncRNA 1..20: ncRNA_class = sgRNA
ggggctcggcggctgggccg

SEQ ID NO: 2396 - RNA, 20 nt, synthetic construct
  source 1..20: mol_type = other RNA
  ncRNA 1..20: ncRNA_class = sgRNA
aggacacagtctgccgctgc

SEQ ID NO: 2397 - RNA, 20 nt, synthetic construct
  source 1..20: mol_type = other RNA
  ncRNA 1..20: ncRNA_class = sgRNA
gtgtgcggctctgctcctcc

SEQ ID NO: 2398 - RNA, 20 nt, synthetic construct
  source 1..20: mol_type = other RNA
  ncRNA 1..20: ncRNA_class = sgRNA
tgttctgggagcggctgcag

SEQ ID NO: 2399 - RNA, 20 nt, synthetic construct
  source 1..20: mol_type = other RNA
  ncRNA 1..20: ncRNA_class = sgRNA
tgctcagccccaggcccagg

SEQ ID NO: 2400 - RNA, 20 nt, synthetic construct
  source 1..20: mol_type = other RNA
  ncRNA 1..20: ncRNA_class = sgRNA
ctctgctcctcctgggcctg

SEQ ID NO: 2401 - RNA, 20 nt, synthetic construct
  source 1..20: mol_type = other RNA
  ncRNA 1..20: ncRNA_class = sgRNA
ggctctgctcctcctgggcc

SEQ ID NO: 2402 - RNA, 20 nt, synthetic construct
  source 1..20: mol_type = other RNA
  ncRNA 1..20: ncRNA_class = sgRNA
ctggggagaagtgccctgga

SEQ ID NO: 2403 - RNA, 20 nt, synthetic construct
  source 1..20: mol_type = other RNA
  ncRNA 1..20: ncRNA_class = sgRNA
gcaggcctggttgtcgcctg

SEQ ID NO: 2404 - RNA, 20 nt, synthetic construct
  source 1..20: mol_type = other RNA
  ncRNA 1..20: ncRNA_class = sgRNA
gctattgctggccggctgca

SEQ ID NO: 2405 - RNA, 20 nt, synthetic construct
  source 1..20: mol_type = other RNA
  ncRNA 1..20: ncRNA_class = sgRNA
gcgtccgagctattgctggc

SEQ ID NO: 2406 - RNA, 20 nt, synthetic construct
  source 1..20: mol_type = other RNA
  ncRNA 1..20: ncRNA_class = sgRNA
tagctcggacgcaatctgtg

SEQ ID NO: 2407 - RNA, 20 nt, synthetic construct
  source 1..20: mol_type = other RNA
  ncRNA 1..20: ncRNA_class = sgRNA
gcagccggccagcaatagct

SEQ ID NO: 2408 - RNA, 20 nt, synthetic construct
  source 1..20: mol_type = other RNA
  ncRNA 1..20: ncRNA_class = sgRNA
cttctccccaggcgacaacc

SEQ ID NO: 2409 - RNA, 20 nt, synthetic construct
  source 1..20: mol_type = other RNA
  ncRNA 1..20: ncRNA_class = sgRNA
cagggtgtgcttcccagcca

SEQ ID NO: 2410 - RNA, 20 nt, synthetic construct
  source 1..20: mol_type = other RNA
  ncRNA 1..20: ncRNA_class = sgRNA
cctggggagaagtgccctgg

SEQ ID NO: 2411 - RNA, 20 nt, synthetic construct
  source 1..20: mol_type = other RNA
  ncRNA 1..20: ncRNA_class = sgRNA
tgcaggcctggttgtcgcct

SEQ ID NO: 2412 - RNA, 20 nt, synthetic construct
  source 1..20: mol_type = other RNA
  ncRNA 1..20: ncRNA_class = sgRNA
ttgcaggcctggttgtcgcc

SEQ ID NO: 2413 - RNA, 20 nt, synthetic construct
  source 1..20: mol_type = other RNA
  ncRNA 1..20: ncRNA_class = sgRNA
gattgcgtccgagctattgc

SEQ ID NO: 2414 - RNA, 20 nt, synthetic construct
  source 1..20: mol_type = other RNA
  ncRNA 1..20: ncRNA_class = sgRNA
tcgcctggggagaagtgccc

SEQ ID NO: 2415 - RNA, 20 nt, synthetic construct
  source 1..20: mol_type = other RNA
  ncRNA 1..20: ncRNA_class = sgRNA
gagaagtgccctggagggca

SEQ ID NO: 2416 - RNA, 20 nt, synthetic construct
  source 1..20: mol_type = other RNA
  ncRNA 1..20: ncRNA_class = sgRNA
actgtgccccctgccctcca

SEQ ID NO: 2417 - RNA, 20 nt, synthetic construct
  source 1..20: mol_type = other RNA
  ncRNA 1..20: ncRNA_class = sgRNA
cctccagggcacttctcccc

SEQ ID NO: 2418 - RNA, 20 nt, synthetic construct
  source 1..20: mol_type = other RNA
  ncRNA 1..20: ncRNA_class = sgRNA
tgggaagcacaccctgcagc

SEQ ID NO: 2419 - RNA, 20 nt, synthetic construct
  source 1..20: mol_type = other RNA
  ncRNA 1..20: ncRNA_class = sgRNA
gaagtgccctggagggcagg

SEQ ID NO: 2420 - RNA, 20 nt, synthetic construct
  source 1..20: mol_type = other RNA
  ncRNA 1..20: ncRNA_class = sgRNA
agctattgctggccggctgc

SEQ ID NO: 2421 - RNA, 20 nt, synthetic construct
  source 1..20: mol_type = other RNA
  ncRNA 1..20: ncRNA_class = sgRNA
tggtccagggcttgcaggcc

SEQ ID NO: 2422 - RNA, 20 nt, synthetic construct
  source 1..20: mol_type = other RNA
  ncRNA 1..20: ncRNA_class = sgRNA
agaagtgccctggagggcag

SEQ ID NO: 2423 - RNA, 20 nt, synthetic construct
  source 1..20: mol_type = other RNA
  ncRNA 1..20: ncRNA_class = sgRNA
tcacttggtccagggcttgc

SEQ ID NO: 2424 - RNA, 20 nt, synthetic construct
  source 1..20: mol_type = other RNA
  ncRNA 1..20: ncRNA_class = sgRNA
ggagaagtgccctggagggc

SEQ ID NO: 2425 - RNA, 20 nt, synthetic construct
  source 1..20: mol_type = other RNA
  ncRNA 1..20: ncRNA_class = sgRNA
acaaccaggcctgcaagccc

SEQ ID NO: 2426 - RNA, 20 nt, synthetic construct
  source 1..20: mol_type = other RNA
  ncRNA 1..20: ncRNA_class = sgRNA
gactgtgccccctgccctcc

SEQ ID NO: 2427 - RNA, 20 nt, synthetic construct
  source 1..20: mol_type = other RNA
  ncRNA 1..20: ncRNA_class = sgRNA
gtccctccggagcaggtaca

SEQ ID NO: 2428 - RNA, 20 nt, synthetic construct
  source 1..20: mol_type = other RNA
  ncRNA 1..20: ncRNA_class = sgRNA
ggcctgctcctcttggatgg

SEQ ID NO: 2429 - RNA, 20 nt, synthetic construct
  source 1..20: mol_type = other RNA
  ncRNA 1..20: ncRNA_class = sgRNA
tttccggacccccatccaag

SEQ ID NO: 2430 - RNA, 20 nt, synthetic construct
  source 1..20: mol_type = other RNA
  ncRNA 1..20: ncRNA_class = sgRNA
cagggggcttgtgggcatcg

SEQ ID NO: 2431 - RNA, 20 nt, synthetic construct
  source 1..20: mol_type = other RNA
  ncRNA 1..20: ncRNA_class = sgRNA
agggggcttgtgggcatcgg

SEQ ID NO: 2432 - RNA, 20 nt, synthetic construct
  source 1..20: mol_type = other RNA
  ncRNA 1..20: ncRNA_class = sgRNA
tcggcctgctcctcttggat

SEQ ID NO: 2433 - RNA, 20 nt, synthetic construct
  source 1..20: mol_type = other RNA
  ncRNA 1..20: ncRNA_class = sgRNA
gggggcttgtgggcatcggg

SEQ ID NO: 2434 - RNA, 20 nt, synthetic construct
  source 1..20: mol_type = other RNA
  ncRNA 1..20: ncRNA_class = sgRNA
gtcggcctgctcctcttgga

SEQ ID NO: 2435 - RNA, 20 nt, synthetic construct
  source 1..20: mol_type = other RNA
  ncRNA 1..20: ncRNA_class = sgRNA
cggcctgctcctcttggatg

SEQ ID NO: 2436 - RNA, 20 nt, synthetic construct
  source 1..20: mol_type = other RNA
  ncRNA 1..20: ncRNA_class = sgRNA
tggccctgtacctgctccgg

SEQ ID NO: 2437 - RNA, 20 nt, synthetic construct
  source 1..20: mol_type = other RNA
  ncRNA 1..20: ncRNA_class = sgRNA
ggccctgtacctgctccgga

SEQ ID NO: 2438 - RNA, 20 nt, synthetic construct
  source 1..20: mol_type = other RNA
  ncRNA 1..20: ncRNA_class = sgRNA
accagggggcttgtgggcat

SEQ ID NO: 2439 - RNA, 20 nt, synthetic construct
  source 1..20: mol_type = other RNA
  ncRNA 1..20: ncRNA_class = sgRNA
ggggcagcctctggtccctc

SEQ ID NO: 2440 - RNA, 20 nt, synthetic construct
  source 1..20: mol_type = other RNA
  ncRNA 1..20: ncRNA_class = sgRNA
gctcctcttggatgggggtc

SEQ ID NO: 2441 - RNA, 20 nt, synthetic construct
  source 1..20: mol_type = other RNA
  ncRNA 1..20: ncRNA_class = sgRNA
ccagggggcttgtgggcatc

SEQ ID NO: 2442 - RNA, 20 nt, synthetic construct
  source 1..20: mol_type = other RNA
  ncRNA 1..20: ncRNA_class = sgRNA
cccgatgcccacaagccccc

SEQ ID NO: 2443 - RNA, 20 nt, synthetic construct
  source 1..20: mol_type = other RNA
  ncRNA 1..20: ncRNA_class = sgRNA
gggcgtcggcctgctcctct

SEQ ID NO: 2444 - RNA, 20 nt, synthetic construct
  source 1..20: mol_type = other RNA
  ncRNA 1..20: ncRNA_class = sgRNA
tgctggccctgtacctgctc

SEQ ID NO: 2445 - RNA, 20 nt, synthetic construct
  source 1..20: mol_type = other RNA
  ncRNA 1..20: ncRNA_class = sgRNA
gggcatcggggggcagcctc

SEQ ID NO: 2446 - RNA, 20 nt, synthetic construct
  source 1..20: mol_type = other RNA
  ncRNA 1..20: ncRNA_class = sgRNA
gacccccatccaagaggagc

SEQ ID NO: 2447 - RNA, 20 nt, synthetic construct
  source 1..20: mol_type = other RNA
  ncRNA 1..20: ncRNA_class = sgRNA
agggccagcaggatggccag

SEQ ID NO: 2448 - RNA, 20 nt, synthetic construct
  source 1..20: mol_type = other RNA
  ncRNA 1..20: ncRNA_class = sgRNA
acctgctccggagggaccag

SEQ ID NO: 2449 - RNA, 20 nt, synthetic construct
  source 1..20: mol_type = other RNA
  ncRNA 1..20: ncRNA_class = sgRNA
gcctctggtccctccggagc

SEQ ID NO: 2450 - RNA, 20 nt, synthetic construct
  source 1..20: mol_type = other RNA
  ncRNA 1..20: ncRNA_class = sgRNA
cagggccagcaggatggcca

SEQ ID NO: 2451 - RNA, 20 nt, synthetic construct
  source 1..20: mol_type = other RNA
  ncRNA 1..20: ncRNA_class = sgRNA
caggtacagggccagcagga

SEQ ID NO: 2452 - RNA, 20 nt, synthetic construct
  source 1..20: mol_type = other RNA
  ncRNA 1..20: ncRNA_class = sgRNA
ggagcaggtacagggccagc

SEQ ID NO: 2453 - RNA, 20 nt, synthetic construct
  source 1..20: mol_type = other RNA
  ncRNA 1..20: ncRNA_class = sgRNA
ggtccctccggagcaggtac

SEQ ID NO: 2454 - RNA, 20 nt, synthetic construct
  source 1..20: mol_type = other RNA
  ncRNA 1..20: ncRNA_class = sgRNA
acagggccagcaggatggcc

SEQ ID NO: 2455 - RNA, 20 nt, synthetic construct
  source 1..20: mol_type = other RNA
  ncRNA 1..20: ncRNA_class = sgRNA
gggccccctggccatcctgc

SEQ ID NO: 2456 - RNA, 20 nt, synthetic construct
  source 1..20: mol_type = other RNA
  ncRNA 1..20: ncRNA_class = sgRNA
gctggggctgctgggccccc

SEQ ID NO: 2457 - RNA, 20 nt, synthetic construct
  source 1..20: mol_type = other RNA
  ncRNA 1..20: ncRNA_class = sgRNA
ggcctggtgctggggctgct

SEQ ID NO: 2458 - RNA, 20 nt, synthetic construct
  source 1..20: mol_type = other RNA
  ncRNA 1..20: ncRNA_class = sgRNA
ggggacctccacgggccggg

SEQ ID NO: 2459 - RNA, 20 nt, synthetic construct
  source 1..20: mol_type = other RNA
  ncRNA 1..20: ncRNA_class = sgRNA
cggcccgtggaggtccccgg

SEQ ID NO: 2460 - RNA, 20 nt, synthetic construct
  source 1..20: mol_type = other RNA
  ncRNA 1..20: ncRNA_class = sgRNA
ccaggatggcggcaaccgca

SEQ ID NO: 2461 - RNA, 20 nt, synthetic construct
  source 1..20: mol_type = other RNA
  ncRNA 1..20: ncRNA_class = sgRNA
ccggcccgtggaggtccccg

SEQ ID NO: 2462 - RNA, 20 nt, synthetic construct
  source 1..20: mol_type = other RNA
  ncRNA 1..20: ncRNA_class = sgRNA
accctccacccggcccgtgg

SEQ ID NO: 2463 - RNA, 20 nt, synthetic construct
  source 1..20: mol_type = other RNA
  ncRNA 1..20: ncRNA_class = sgRNA
ccgggtggagggtccctgtg

SEQ ID NO: 2464 - RNA, 20 nt, synthetic construct
  source 1..20: mol_type = other RNA
  ncRNA 1..20: ncRNA_class = sgRNA
cagtgatgggcctggccggg

SEQ ID NO: 2465 - RNA, 20 nt, synthetic construct
  source 1..20: mol_type = other RNA
  ncRNA 1..20: ncRNA_class = sgRNA
gttctgggccaggcttcagt

SEQ ID NO: 2466 - RNA, 20 nt, synthetic construct
  source 1..20: mol_type = other RNA
  ncRNA 1..20: ncRNA_class = sgRNA
acagtgatgggcctggccgg

SEQ ID NO: 2467 - RNA, 20 nt, synthetic construct
  source 1..20: mol_type = other RNA
  ncRNA 1..20: ncRNA_class = sgRNA
ctgggtctcctggggctgcg

SEQ ID NO: 2468 - RNA, 20 nt, synthetic construct
  source 1..20: mol_type = other RNA
  ncRNA 1..20: ncRNA_class = sgRNA
gggaccctccacccggcccg

SEQ ID NO: 2469 - RNA, 20 nt, synthetic construct
  source 1..20: mol_type = other RNA
  ncRNA 1..20: ncRNA_class = sgRNA
cggacgcaatctgtgaggac

SEQ ID NO: 2470 - RNA, 20 nt, synthetic construct
  source 1..20: mol_type = other RNA
  ncRNA 1..20: ncRNA_class = sgRNA
ggacgcaatctgtgaggaca

SEQ ID NO: 2471 - RNA, 20 nt, synthetic construct
  source 1..20: mol_type = other RNA
  ncRNA 1..20: ncRNA_class = sgRNA
agcctggcccagaacctcac

SEQ ID NO: 2472 - RNA, 20 nt, synthetic construct
  source 1..20: mol_type = other RNA
  ncRNA 1..20: ncRNA_class = sgRNA
gcctggcccagaacctcaca

SEQ ID NO: 2473 - RNA, 20 nt, synthetic construct
  source 1..20: mol_type = other RNA
  ncRNA 1..20: ncRNA_class = sgRNA
tcagtgggctggacagtgat

SEQ ID NO: 2474 - RNA, 20 nt, synthetic construct
  source 1..20: mol_type = other RNA
  ncRNA 1..20: ncRNA_class = sgRNA
cccggggacctccacgggcc

SEQ ID NO: 2475 - RNA, 20 nt, synthetic construct
  source 1..20: mol_type = other RNA
  ncRNA 1..20: ncRNA_class = sgRNA
tggacagtgatgggcctggc

SEQ ID NO: 2476 - RNA, 20 nt, synthetic construct
  source 1..20: mol_type = other RNA
  ncRNA 1..20: ncRNA_class = sgRNA
ccgtgcggttgccgccatcc

SEQ ID NO: 2477 - RNA, 20 nt, synthetic construct
  source 1..20: mol_type = other RNA
  ncRNA 1..20: ncRNA_class = sgRNA
acctccacgggccgggtgga

SEQ ID NO: 2478 - RNA, 20 nt, synthetic construct
  source 1..20: mol_type = other RNA
  ncRNA 1..20: ncRNA_class = sgRNA
ccccggggacctccacgggc

SEQ ID NO: 2479 - RNA, 20 nt, synthetic construct
  source 1..20: mol_type = other RNA
  ncRNA 1..20: ncRNA_class = sgRNA
acccggcccgtggaggtccc

SEQ ID NO: 2480 - RNA, 20 nt, synthetic construct
  source 1..20: mol_type = other RNA
  ncRNA 1..20: ncRNA_class = sgRNA
acgcagccccaggagaccca

SEQ ID NO: 2481 - RNA, 20 nt, synthetic construct
  source 1..20: mol_type = other RNA
  ncRNA 1..20: ncRNA_class = sgRNA
gagggtccctgtgaggttct

SEQ ID NO: 2482 - RNA, 20 nt, synthetic construct
  source 1..20: mol_type = other RNA
  ncRNA 1..20: ncRNA_class = sgRNA
caggcccaggcccaggatgg

SEQ ID NO: 2483 - RNA, 20 nt, synthetic construct
  source 1..20: mol_type = other RNA
  ncRNA 1..20: ncRNA_class = sgRNA
ttcagtgggctggacagtga

SEQ ID NO: 2484 - RNA, 20 nt, synthetic construct
  source 1..20: mol_type = other RNA
  ncRNA 1..20: ncRNA_class = sgRNA
ggttctgggccaggcttcag

SEQ ID NO: 2485 - RNA, 20 nt, synthetic construct
  source 1..20: mol_type = other RNA
  ncRNA 1..20: ncRNA_class = sgRNA
ctgtccagcccactgaagcc

SEQ ID NO: 2486 - RNA, 20 nt, synthetic construct
  source 1..20: mol_type = other RNA
  ncRNA 1..20: ncRNA_class = sgRNA
cccggcccgtggaggtcccc

SEQ ID NO: 2487 - RNA, 20 nt, synthetic construct
  source 1..20: mol_type = other RNA
  ncRNA 1..20: ncRNA_class = sgRNA
gacagtgatgggcctggccg

SEQ ID NO: 2488 - RNA, 20 nt, synthetic construct
  source 1..20: mol_type = other RNA
  ncRNA 1..20: ncRNA_class = sgRNA
tcctggggctgcgtggctgg

SEQ ID NO: 2489 - RNA, 20 nt, synthetic construct
  source 1..20: mol_type = other RNA
  ncRNA 1..20: ncRNA_class = sgRNA
ggacagtgatgggcctggcc

SEQ ID NO: 2490 - RNA, 20 nt, synthetic construct
  source 1..20: mol_type = other RNA
  ncRNA 1..20: ncRNA_class = sgRNA
ctcctggggctgcgtggctg

SEQ ID NO: 2491 - RNA, 20 nt, synthetic construct
  source 1..20: mol_type = other RNA
  ncRNA 1..20: ncRNA_class = sgRNA
gacctccacgggccgggtgg

SEQ ID NO: 2492 - RNA, 20 nt, synthetic construct
  source 1..20: mol_type = other RNA
  ncRNA 1..20: ncRNA_class = sgRNA
gggctggacagtgatgggcc

SEQ ID NO: 2493 - RNA, 20 nt, synthetic construct
  source 1..20: mol_type = other RNA
  ncRNA 1..20: ncRNA_class = sgRNA
tctcctggggctgcgtggct

SEQ ID NO: 2494 - RNA, 20 nt, synthetic construct
  source 1..20: mol_type = other RNA
  ncRNA 1..20: ncRNA_class = sgRNA
agacccagggccccccggcc

SEQ ID NO: 2495 - RNA, 20 nt, synthetic construct
  source 1..20: mol_type = other RNA
  ncRNA 1..20: ncRNA_class = sgRNA
ggagggtccctgtgaggttc

SEQ ID NO: 2496 - RNA, 20 nt, synthetic construct
  source 1..20: mol_type = other RNA
  ncRNA 1..20: ncRNA_class = sgRNA
ggggggccctgggtctcctg

SEQ ID NO: 2497 - RNA, 20 nt, synthetic construct
  source 1..20: mol_type = other RNA
  ncRNA 1..20: ncRNA_class = sgRNA
gtctcctggggctgcgtggc

SEQ ID NO: 2498 - RNA, 20 nt, synthetic construct
  source 1..20: mol_type = other RNA
  ncRNA 1..20: ncRNA_class = sgRNA
gggcctggccggggggccct

SEQ ID NO: 2499 - RNA, 20 nt, synthetic construct
  source 1..20: mol_type = other RNA
  ncRNA 1..20: ncRNA_class = sgRNA
ccaggagacccagggccccc

SEQ ID NO: 2500 - RNA, 20 nt, synthetic construct
  source 1..20: mol_type = other RNA
  ncRNA 1..20: ncRNA_class = sgRNA
tgggccaggcttcagtgggc

SEQ ID NO: 2501 - RNA, 20 nt, synthetic construct
  source 1..20: mol_type = other RNA
  ncRNA 1..20: ncRNA_class = sgRNA
cacgcagccccaggagaccc

SEQ ID NO: 2502 - RNA, 20 nt, synthetic construct
  source 1..20: mol_type = other RNA
  ncRNA 1..20: ncRNA_class = sgRNA
tccctgtgaggttctgggcc

SEQ ID NO: 2503 - RNA, 20 nt, synthetic construct
  source 1..20: mol_type = other RNA
  ncRNA 1..20: ncRNA_class = sgRNA
cgtgcggttgccgccatcct

SEQ ID NO: 2504 - RNA, 20 nt, synthetic construct
  source 1..20: mol_type = other RNA
  ncRNA 1..20: ncRNA_class = sgRNA
cggggggccctgggtctcct

SEQ ID NO: 2505 - RNA, 20 nt, synthetic construct
  source 1..20: mol_type = other RNA
  ncRNA 1..20: ncRNA_class = sgRNA
ccccccagccacgcagcccc

SEQ ID NO: 2506 - RNA, 20 nt, synthetic construct
  source 1..20: mol_type = other RNA
  ncRNA 1..20: ncRNA_class = sgRNA
tgggcctggccggggggccc

SEQ ID NO: 2507 - RNA, 20 nt, synthetic construct
  source 1..20: mol_type = other RNA
  ncRNA 1..20: ncRNA_class = sgRNA
gttgccgccatcctgggcct

SEQ ID NO: 2508 - RNA, 20 nt, synthetic construct
  source 1..20: mol_type = other RNA
  ncRNA 1..20: ncRNA_class = sgRNA
ggttgccgccatcctgggcc

SEQ ID NO: 2509 - RNA, 20 nt, synthetic construct
  source 1..20: mol_type = other RNA
  ncRNA 1..20: ncRNA_class = sgRNA
ctgggcctgggcctggtgct

SEQ ID NO: 2510 - RNA, 20 nt, synthetic construct
  source 1..20: mol_type = other RNA
  ncRNA 1..20: ncRNA_class = sgRNA
ccggggggccctgggtctcc

SEQ ID NO: 2511 - RNA, 20 nt, synthetic construct
  source 1..20: mol_type = other RNA
  ncRNA 1..20: ncRNA_class = sgRNA
cgccatcctgggcctgggcc

SEQ ID NO: 2512 - RNA, 20 nt, synthetic construct
  source 1..20: mol_type = other RNA
  ncRNA 1..20: ncRNA_class = sgRNA
aggtcagatcttggccaggg

SEQ ID NO: 2513 - RNA, 20 nt, synthetic construct
  source 1..20: mol_type = other RNA
  ncRNA 1..20: ncRNA_class = sgRNA
ggtgggcccaggtcagatct

SEQ ID NO: 2514 - RNA, 20 nt, synthetic construct
  source 1..20: mol_type = other RNA
  ncRNA 1..20: ncRNA_class = sgRNA
cccaggtcagatcttggcca

SEQ ID NO: 2515 - RNA, 20 nt, synthetic construct
  source 1..20: mol_type = other RNA
  ncRNA 1..20: ncRNA_class = sgRNA
gcccaggtcagatcttggcc

SEQ ID NO: 2516 - RNA, 20 nt, synthetic construct
  source 1..20: mol_type = other RNA
  ncRNA 1..20: ncRNA_class = sgRNA
ggccgacgcccactccaccc

SEQ ID NO: 2517 - RNA, 20 nt, synthetic construct
  source 1..20: mol_type = other RNA
  ncRNA 1..20: ncRNA_class = sgRNA
ggccagggtggagtgggcgt

SEQ ID NO: 2518 - RNA, 20 nt, synthetic construct
  source 1..20: mol_type = other RNA
  ncRNA 1..20: ncRNA_class = sgRNA
tgcttctcactggtacatgg

SEQ ID NO: 2519 - RNA, 20 nt, synthetic construct
  source 1..20: mol_type = other RNA
  ncRNA 1..20: ncRNA_class = sgRNA
taatgcttctcactggtaca

SEQ ID NO: 2520 - RNA, 20 nt, synthetic construct
  source 1..20: mol_type = other RNA
  ncRNA 1..20: ncRNA_class = sgRNA
gagaagcattatgagcatct

SEQ ID NO: 2521 - RNA, 20 nt, synthetic construct
  source 1..20: mol_type = other RNA
  ncRNA 1..20: ncRNA_class = sgRNA
agcattatgagcatctggga

SEQ ID NO: 2522 - RNA, 20 nt, synthetic construct
  source 1..20: mol_type = other RNA
  ncRNA 1..20: ncRNA_class = sgRNA
gggcagacatacactgtcag

SEQ ID NO: 2523 - RNA, 20 nt, synthetic construct
  source 1..20: mol_type = other RNA
  ncRNA 1..20: ncRNA_class = sgRNA
gacagtgtatgtctgccctg

SEQ ID NO: 2524 - RNA, 20 nt, synthetic construct
  source 1..20: mol_type = other RNA
  ncRNA 1..20: ncRNA_class = sgRNA
aagtattcatccgggccaca

SEQ ID NO: 2525 - RNA, 20 nt, synthetic construct
  source 1..20: mol_type = other RNA
  ncRNA 1..20: ncRNA_class = sgRNA
cgtgcacgcgcagcgccggg

SEQ ID NO: 2526 - RNA, 20 nt, synthetic construct
  source 1..20: mol_type = other RNA
  ncRNA 1..20: ncRNA_class = sgRNA
gcagcagcgcgaacagcggg

SEQ ID NO: 2527 - RNA, 20 nt, synthetic construct
  source 1..20: mol_type = other RNA
  ncRNA 1..20: ncRNA_class = sgRNA
ccggcaacagcacgaccccc

SEQ ID NO: 2528 - RNA, 20 nt, synthetic construct
  source 1..20: mol_type = other RNA
  ncRNA 1..20: ncRNA_class = sgRNA
caagtattcatccgggccac

SEQ ID NO: 2529 - RNA, 20 nt, synthetic construct
  source 1..20: mol_type = other RNA
  ncRNA 1..20: ncRNA_class = sgRNA
cagccgtgcacgcgcagcgc

SEQ ID NO: 2530 - RNA, 20 nt, synthetic construct
  source 1..20: mol_type = other RNA
  ncRNA 1..20: ncRNA_class = sgRNA
cgtgctgttgccggcgacca

SEQ ID NO: 2531 - RNA, 20 nt, synthetic construct
  source 1..20: mol_type = other RNA
  ncRNA 1..20: ncRNA_class = sgRNA
tgctgtaacaaatgtgaacc

SEQ ID NO: 2532 - RNA, 20 nt, synthetic construct
  source 1..20: mol_type = other RNA
  ncRNA 1..20: ncRNA_class = sgRNA
ccgtgcacgcgcagcgccgg

SEQ ID NO: 2533 - RNA, 20 nt, synthetic construct
  source 1..20: mol_type = other RNA
  ncRNA 1..20: ncRNA_class = sgRNA
ctgtggcccggatgaatact

SEQ ID NO: 2534 - RNA, 20 nt, synthetic construct
  source 1..20: mol_type = other RNA
  ncRNA 1..20: ncRNA_class = sgRNA
agccgtgcacgcgcagcgcc

SEQ ID NO: 2535 - RNA, 20 nt, synthetic construct
  source 1..20: mol_type = other RNA
  ncRNA 1..20: ncRNA_class = sgRNA
tgtatgtctgccctgtggcc

SEQ ID NO: 2536 - RNA, 20 nt, synthetic construct
  source 1..20: mol_type = other RNA
  ncRNA 1..20: ncRNA_class = sgRNA
gccgtgcacgcgcagcgccg

SEQ ID NO: 2537 - RNA, 20 nt, synthetic construct
  source 1..20: mol_type = other RNA
  ncRNA 1..20: ncRNA_class = sgRNA
agcagcagcagcgcgaacag

SEQ ID NO: 2538 - RNA, 20 nt, synthetic construct
  source 1..20: mol_type = other RNA
  ncRNA 1..20: ncRNA_class = sgRNA
gccggcgaccacggccacca

SEQ ID NO: 2539 - RNA, 20 nt, synthetic construct
  source 1..20: mol_type = other RNA
  ncRNA 1..20: ncRNA_class = sgRNA
agctatccaagtattcatcc

SEQ ID NO: 2540 - RNA, 20 nt, synthetic construct
  source 1..20: mol_type = other RNA
  ncRNA 1..20: ncRNA_class = sgRNA
ccggggggtcgtgctgttgc

SEQ ID NO: 2541 - RNA, 20 nt, synthetic construct
  source 1..20: mol_type = other RNA
  ncRNA 1..20: ncRNA_class = sgRNA
gcggcgccgccgggcgcgcg

SEQ ID NO: 2542 - RNA, 20 nt, synthetic construct
  source 1..20: mol_type = other RNA
  ncRNA 1..20: ncRNA_class = sgRNA
gaacagcgggcggcgccgcc

SEQ ID NO: 2543 - RNA, 20 nt, synthetic construct
  source 1..20: mol_type = other RNA
  ncRNA 1..20: ncRNA_class = sgRNA
gccctggtggccgtggtcgc

SEQ ID NO: 2544 - RNA, 20 nt, synthetic construct
  source 1..20: mol_type = other RNA
  ncRNA 1..20: ncRNA_class = sgRNA
cagctatccaagtattcatc

SEQ ID NO: 2545 - RNA, 20 nt, synthetic construct
  source 1..20: mol_type = other RNA
  ncRNA 1..20: ncRNA_class = sgRNA
cgaacagcgggcggcgccgc

SEQ ID NO: 2546 - RNA, 20 nt, synthetic construct
  source 1..20: mol_type = other RNA
  ncRNA 1..20: ncRNA_class = sgRNA
tgagaagcattatgagcatc

SEQ ID NO: 2547 - RNA, 20 nt, synthetic construct
  source 1..20: mol_type = other RNA
  ncRNA 1..20: ncRNA_class = sgRNA
ctgcataaagtttgtgatac

SEQ ID NO: 2548 - RNA, 20 nt, synthetic construct
  source 1..20: mol_type = other RNA
  ncRNA 1..20: ncRNA_class = sgRNA
gcagcagcagcgcgaacagc

SEQ ID NO: 2549 - RNA, 20 nt, synthetic construct
  source 1..20: mol_type = other RNA
  ncRNA 1..20: ncRNA_class = sgRNA
tgctctgcgcgctgctcgcc

SEQ ID NO: 2550 - RNA, 20 nt, synthetic construct
  source 1..20: mol_type = other RNA
  ncRNA 1..20: ncRNA_class = sgRNA
gggcggcgccgccgggcgcg

SEQ ID NO: 2551 - RNA, 20 nt, synthetic construct
  source 1..20: mol_type = other RNA
  ncRNA 1..20: ncRNA_class = sgRNA
tgccggcgaccacggccacc

SEQ ID NO: 2552 - RNA, 20 nt, synthetic construct
  source 1..20: mol_type = other RNA
  ncRNA 1..20: ncRNA_class = sgRNA
aggcaaggccctggtggccg

SEQ ID NO: 2553 - RNA, 20 nt, synthetic construct
  source 1..20: mol_type = other RNA
  ncRNA 1..20: ncRNA_class = sgRNA
ggcggcgccgccgggcgcgc

SEQ ID NO: 2554 - RNA, 20 nt, synthetic construct
  source 1..20: mol_type = other RNA
  ncRNA 1..20: ncRNA_class = sgRNA
cccccggcgctgcgcgtgca

SEQ ID NO: 2555 - RNA, 20 nt, synthetic construct
  source 1..20: mol_type = other RNA
  ncRNA 1..20: ncRNA_class = sgRNA
gcgcgcactcggtgttgcgg

SEQ ID NO: 2556 - RNA, 20 nt, synthetic construct
  source 1..20: mol_type = other RNA
  ncRNA 1..20: ncRNA_class = sgRNA
catcagagaagtagcctgca

SEQ ID NO: 2557 - RNA, 20 nt, synthetic construct
  source 1..20: mol_type = other RNA
  ncRNA 1..20: ncRNA_class = sgRNA
ccagggtctgcatttgtccg

SEQ ID NO: 2558 - RNA, 20 nt, synthetic construct
  source 1..20: mol_type = other RNA
  ncRNA 1..20: ncRNA_class = sgRNA
tgggacagagaaatccgatg

SEQ ID NO: 2559 - RNA, 20 nt, synthetic construct
  source 1..20: mol_type = other RNA
  ncRNA 1..20: ncRNA_class = sgRNA
agaagaactgcaaaccgcat

SEQ ID NO: 2560 - RNA, 20 nt, synthetic construct
  source 1..20: mol_type = other RNA
  ncRNA 1..20: ncRNA_class = sgRNA
gggtctgcatttgtccgtgg

SEQ ID NO: 2561 - RNA, 20 nt, synthetic construct
  source 1..20: mol_type = other RNA
  ncRNA 1..20: ncRNA_class = sgRNA
gagaagtagcctgcaaggca

SEQ ID NO: 2562 - RNA, 20 nt, synthetic construct
  source 1..20: mol_type = other RNA
  ncRNA 1..20: ncRNA_class = sgRNA
ccggcgcgcactcggtgttg

SEQ ID NO: 2563 - RNA, 20 nt, synthetic construct
  source 1..20: mol_type = other RNA
  ncRNA 1..20: ncRNA_class = sgRNA
ggcgctgcgcgtgcacggct

SEQ ID NO: 2564 - RNA, 20 nt, synthetic construct
  source 1..20: mol_type = other RNA
  ncRNA 1..20: ncRNA_class = sgRNA
ccgcaacaccgagtgcgcgc

SEQ ID NO: 2565 - RNA, 20 nt, synthetic construct
  source 1..20: mol_type = other RNA
  ncRNA 1..20: ncRNA_class = sgRNA
ccacggacaaatgcagaccc

SEQ ID NO: 2566 - RNA, 20 nt, synthetic construct
  source 1..20: mol_type = other RNA
  ncRNA 1..20: ncRNA_class = sgRNA
cgtgcacggctgggtaccac

SEQ ID NO: 2567 - RNA, 20 nt, synthetic construct
  source 1..20: mol_type = other RNA
  ncRNA 1..20: ncRNA_class = sgRNA
gatgttctactctctttcca

SEQ ID NO: 2568 - RNA, 20 nt, synthetic construct
  source 1..20: mol_type = other RNA
  ncRNA 1..20: ncRNA_class = sgRNA
gcccaggcccggcgcgcact

SEQ ID NO: 2569 - RNA, 20 nt, synthetic construct
  source 1..20: mol_type = other RNA
  ncRNA 1..20: ncRNA_class = sgRNA
cgcaacaccgagtgcgcgcc

SEQ ID NO: 2570 - RNA, 20 nt, synthetic construct
  source 1..20: mol_type = other RNA
  ncRNA 1..20: ncRNA_class = sgRNA
cggcgctgcgcgtgcacggc

SEQ ID NO: 2571 - RNA, 20 nt, synthetic construct
  source 1..20: mol_type = other RNA
  ncRNA 1..20: ncRNA_class = sgRNA
ggaaagagagtagaacatca

SEQ ID NO: 2572 - RNA, 20 nt, synthetic construct
  source 1..20: mol_type = other RNA
  ncRNA 1..20: ncRNA_class = sgRNA
ttctactctctttccaagga

SEQ ID NO: 2573 - RNA, 20 nt, synthetic construct
  source 1..20: mol_type = other RNA
  ncRNA 1..20: ncRNA_class = sgRNA
gaaagagagtagaacatcat

SEQ ID NO: 2574 - RNA, 20 nt, synthetic construct
  source 1..20: mol_type = other RNA
  ncRNA 1..20: ncRNA_class = sgRNA
gtgtgcaaaccttgccttgc

SEQ ID NO: 2575 - RNA, 20 nt, synthetic construct
  source 1..20: mol_type = other RNA
  ncRNA 1..20: ncRNA_class = sgRNA
accgagtgcgcgccgggcct

SEQ ID NO: 2576 - RNA, 20 nt, synthetic construct
  source 1..20: mol_type = other RNA
  ncRNA 1..20: ncRNA_class = sgRNA
ggctgggtaccactggagcc

SEQ ID NO: 2577 - RNA, 20 nt, synthetic construct
  source 1..20: mol_type = other RNA
  ncRNA 1..20: ncRNA_class = sgRNA
actcgcagtcctggctccag

SEQ ID NO: 2578 - RNA, 20 nt, synthetic construct
  source 1..20: mol_type = other RNA
  ncRNA 1..20: ncRNA_class = sgRNA
ggcggcagcactcgcagtcc

SEQ ID NO: 2579 - RNA, 20 nt, synthetic construct
  source 1..20: mol_type = other RNA
  ncRNA 1..20: ncRNA_class = sgRNA
caccgagtgcgcgccgggcc

SEQ ID NO: 2580 - RNA, 20 nt, synthetic construct
  source 1..20: mol_type = other RNA
  ncRNA 1..20: ncRNA_class = sgRNA
ctctgatgccttttcctcca

SEQ ID NO: 2581 - RNA, 20 nt, synthetic construct
  source 1..20: mol_type = other RNA
  ncRNA 1..20: ncRNA_class = sgRNA
gcatttgtccgtggaggaaa

SEQ ID NO: 2582 - RNA, 20 nt, synthetic construct
  source 1..20: mol_type = other RNA
  ncRNA 1..20: ncRNA_class = sgRNA
gggtgctgggcgcccaggcc

SEQ ID NO: 2583 - RNA, 20 nt, synthetic construct
  source 1..20: mol_type = other RNA
  ncRNA 1..20: ncRNA_class = sgRNA
tttgtggcactggatcaatg

SEQ ID NO: 2584 - RNA, 20 nt, synthetic construct
  source 1..20: mol_type = other RNA
  ncRNA 1..20: ncRNA_class = sgRNA
cactggatcaatgaggcttg

SEQ ID NO: 2585 - RNA, 20 nt, synthetic construct
  source 1..20: mol_type = other RNA
  ncRNA 1..20: ncRNA_class = sgRNA
tggccgcctaagtggagata

SEQ ID NO: 2586 - RNA, 20 nt, synthetic construct
  source 1..20: mol_type = other RNA
  ncRNA 1..20: ncRNA_class = sgRNA
actgacacaactgtcacctg

SEQ ID NO: 2587 - RNA, 20 nt, synthetic construct
  source 1..20: mol_type = other RNA
  ncRNA 1..20: ncRNA_class = sgRNA
cagttgtgtcagtacacaca

SEQ ID NO: 2588 - RNA, 20 nt, synthetic construct
  source 1..20: mol_type = other RNA
  ncRNA 1..20: ncRNA_class = sgRNA
agtacacacacggcaaactt

SEQ ID NO: 2589 - RNA, 20 nt, synthetic construct
  source 1..20: mol_type = other RNA
  ncRNA 1..20: ncRNA_class = sgRNA
acggcaaactttggtcagca

SEQ ID NO: 2590 - RNA, 20 nt, synthetic construct
  source 1..20: mol_type = other RNA
  ncRNA 1..20: ncRNA_class = sgRNA
tgtcagggcacatgtgtagg

SEQ ID NO: 2591 - RNA, 20 nt, synthetic construct
  source 1..20: mol_type = other RNA
  ncRNA 1..20: ncRNA_class = sgRNA
ggaggtggtccctacgcaca

SEQ ID NO: 2592 - RNA, 20 nt, synthetic construct
  source 1..20: mol_type = other RNA
  ncRNA 1..20: ncRNA_class = sgRNA
acgcacaaggcgaagatgcc

SEQ ID NO: 2593 - RNA, 20 nt, synthetic construct
  source 1..20: mol_type = other RNA
  ncRNA 1..20: ncRNA_class = sgRNA
ggtcagcaagaccgagatag

SEQ ID NO: 2594 - RNA, 20 nt, synthetic construct
  source 1..20: mol_type = other RNA
  ncRNA 1..20: ncRNA_class = sgRNA
gtttaagccagtgcttcacg

SEQ ID NO: 2595 - RNA, 20 nt, synthetic construct
  source 1..20: mol_type = other RNA
  ncRNA 1..20: ncRNA_class = sgRNA
gtccaatcagtcctgcacag

SEQ ID NO: 2596 - RNA, 20 nt, synthetic construct
  source 1..20: mol_type = other RNA
  ncRNA 1..20: ncRNA_class = sgRNA
ttgcaaaaagaggtggacag

SEQ ID NO: 2597 - RNA, 20 nt, synthetic construct
  source 1..20: mol_type = other RNA
  ncRNA 1..20: ncRNA_class = sgRNA
cagtggccattgcccgcact

SEQ ID NO: 2598 - RNA, 20 nt, synthetic construct
  source 1..20: mol_type = other RNA
  ncRNA 1..20: ncRNA_class = sgRNA
gaggactgtgaacccctcgt

SEQ ID NO: 2599 - RNA, 20 nt, synthetic construct
  source 1..20: mol_type = other RNA
  ncRNA 1..20: ncRNA_class = sgRNA
cgttttggggaacccacgag

SEQ ID NO: 2600 - RNA, 20 nt, synthetic construct
  source 1..20: mol_type = other RNA
  ncRNA 1..20: ncRNA_class = sgRNA
acgttttggggaacccacga

SEQ ID NO: 2601 - RNA, 20 nt, synthetic construct
  source 1..20: mol_type = other RNA
  ncRNA 1..20: ncRNA_class = sgRNA
cacgttttggggaacccacg

SEQ ID NO: 2602 - RNA, 20 nt, synthetic construct
  source 1..20: mol_type = other RNA
  ncRNA 1..20: ncRNA_class = sgRNA
gggcaagggtccacgttttg

SEQ ID NO: 2603 - RNA, 20 nt, synthetic construct
  source 1..20: mol_type = other RNA
  ncRNA 1..20: ncRNA_class = sgRNA
ctcgtgggttccccaaaacg

SEQ ID NO: 2604 - RNA, 20 nt, synthetic construct
  source 1..20: mol_type = other RNA
  ncRNA 1..20: ncRNA_class = sgRNA
cccatgccataggcgcactg

SEQ ID NO: 2605 - RNA, 20 nt, synthetic construct
  source 1..20: mol_type = other RNA
  ncRNA 1..20: ncRNA_class = sgRNA
gaggctcccaagctcagcga

SEQ ID NO: 2606 - RNA, 20 nt, synthetic construct
  source 1..20: mol_type = other RNA
  ncRNA 1..20: ncRNA_class = sgRNA
ctacgtcagccagacctcgc

SEQ ID NO: 2607 - RNA, 20 nt, synthetic construct
  source 1..20: mol_type = other RNA
  ncRNA 1..20: ncRNA_class = sgRNA
cgtcagccagacctcgcagg

SEQ ID NO: 2608 - RNA, 20 nt, synthetic construct
  source 1..20: mol_type = other RNA
  ncRNA 1..20: ncRNA_class = sgRNA
gtcagccagacctcgcagga

SEQ ID NO: 2609 - RNA, 20 nt, synthetic construct
  source 1..20: mol_type = other RNA
  ncRNA 1..20: ncRNA_class = sgRNA
gaaggagtctcggcgcgcca

SEQ ID NO: 2610 - RNA, 20 nt, synthetic construct
  source 1..20: mol_type = other RNA
  ncRNA 1..20: ncRNA_class = sgRNA
ggcgcgccgagactccttcg

SEQ ID NO: 2611 - RNA, 20 nt, synthetic construct
  source 1..20: mol_type = other RNA
  ncRNA 1..20: ncRNA_class = sgRNA
cgcgccgagactccttcgcg

SEQ ID NO: 2612 - RNA, 20 nt, synthetic construct
  source 1..20: mol_type = other RNA
  ncRNA 1..20: ncRNA_class = sgRNA
gcgcgggccgttccccgcga

SEQ ID NO: 2613 - RNA, 20 nt, synthetic construct
  source 1..20: mol_type = other RNA
  ncRNA 1..20: ncRNA_class = sgRNA
ccgcgcttcccggacccgtg

SEQ ID NO: 2614 - RNA, 20 nt, synthetic construct
  source 1..20: mol_type = other RNA
  ncRNA 1..20: ncRNA_class = sgRNA
acccgtgcggcggccccgag

SEQ ID NO: 2615 - RNA, 20 nt, synthetic construct
  source 1..20: mol_type = other RNA
  ncRNA 1..20: ncRNA_class = sgRNA
atgtgctacccagatcaagg

SEQ ID NO: 2616 - RNA, 20 nt, synthetic construct
  source 1..20: mol_type = other RNA
  ncRNA 1..20: ncRNA_class = sgRNA
acggggacacagagcacagt

SEQ ID NO: 2617 - RNA, 20 nt, synthetic construct
  source 1..20: mol_type = other RNA
  ncRNA 1..20: ncRNA_class = sgRNA
cacggggacacagagcacag

SEQ ID NO: 2618 - RNA, 20 nt, synthetic construct
  source 1..20: mol_type = other RNA
  ncRNA 1..20: ncRNA_class = sgRNA
gggtctcctcctgcaccggg

SEQ ID NO: 2619 - RNA, 20 nt, synthetic construct
  source 1..20: mol_type = other RNA
  ncRNA 1..20: ncRNA_class = sgRNA
gaggaacagtaactggtctg

SEQ ID NO: 2620 - RNA, 20 nt, synthetic construct
  source 1..20: mol_type = other RNA
  ncRNA 1..20: ncRNA_class = sgRNA
agggggaaggcccatgccat

SEQ ID NO: 2621 - RNA, 20 nt, synthetic construct
  source 1..20: mol_type = other RNA
  ncRNA 1..20: ncRNA_class = sgRNA
gtgcagacatctgcccagtt

SEQ ID NO: 2622 - RNA, 20 nt, synthetic construct
  source 1..20: mol_type = other RNA
  ncRNA 1..20: ncRNA_class = sgRNA
gcccacagaagatgaataca

SEQ ID NO: 2623 - RNA, 20 nt, synthetic construct
  source 1..20: mol_type = other RNA
  ncRNA 1..20: ncRNA_class = sgRNA
gggcaggtgatgaacttcaa

SEQ ID NO: 2624 - RNA, 20 nt, synthetic construct
  source 1..20: mol_type = other RNA
  ncRNA 1..20: ncRNA_class = sgRNA
aagtagttttcagaggacat

SEQ ID NO: 2625 - RNA, 20 nt, synthetic construct
  source 1..20: mol_type = other RNA
  ncRNA 1..20: ncRNA_class = sgRNA
agatgccaggatgctctcat

SEQ ID NO: 2626 - RNA, 20 nt, synthetic construct
  source 1..20: mol_type = other RNA
  ncRNA 1..20: ncRNA_class = sgRNA
aggaacagtaactggtctgt

SEQ ID NO: 2627 - RNA, 20 nt, synthetic construct
  source 1..20: mol_type = other RNA
  ncRNA 1..20: ncRNA_class = sgRNA
gcggcggctgcggagcccat

SEQ ID NO: 2628 - RNA, 20 nt, synthetic construct
  source 1..20: mol_type = other RNA
  ncRNA 1..20: ncRNA_class = sgRNA
gaggcttgtggccgcctaag

SEQ ID NO: 2629 - RNA, 20 nt, synthetic construct
  source 1..20: mol_type = other RNA
  ncRNA 1..20: ncRNA_class = sgRNA
cgcttcccggacccgtgcgg

SEQ ID NO: 2630 - RNA, 20 nt, synthetic construct
  source 1..20: mol_type = other RNA
  ncRNA 1..20: ncRNA_class = sgRNA
gaagttcatcacctgcccgc

SEQ ID NO: 2631 - RNA, 20 nt, synthetic construct
  source 1..20: mol_type = other RNA
  ncRNA 1..20: ncRNA_class = sgRNA
ctgcccgctggagatgaacg

SEQ ID NO: 2632 - RNA, 20 nt, synthetic construct
  source 1..20: mol_type = other RNA
  ncRNA 1..20: ncRNA_class = sgRNA
ccccagtgcgcctatggcat

SEQ ID NO: 2633 - RNA, 20 nt, synthetic construct
  source 1..20: mol_type = other RNA
  ncRNA 1..20: ncRNA_class = sgRNA
gcccatgccataggcgcact

SEQ ID NO: 2634 - RNA, 20 nt, synthetic construct
  source 1..20: mol_type = other RNA
  ncRNA 1..20: ncRNA_class = sgRNA
aggtgtcttactgctgactc

SEQ ID NO: 2635 - RNA, 20 nt, synthetic construct
  source 1..20: mol_type = other RNA
  ncRNA 1..20: ncRNA_class = sgRNA
aaaaaagggaaagcactcac

SEQ ID NO: 2636 - RNA, 20 nt, synthetic construct
  source 1..20: mol_type = other RNA
  ncRNA 1..20: ncRNA_class = sgRNA
cgaaggagtctcggcgcgcc

SEQ ID NO: 2637 - RNA, 20 nt, synthetic construct
  source 1..20: mol_type = other RNA
  ncRNA 1..20: ncRNA_class = sgRNA
gatcaaggtggtgtctgtca

SEQ ID NO: 2638 - RNA, 20 nt, synthetic construct
  source 1..20: mol_type = other RNA
  ncRNA 1..20: ncRNA_class = sgRNA
aggccggtgcaggagcaagg

SEQ ID NO: 2639 - RNA, 20 nt, synthetic construct
  source 1..20: mol_type = other RNA
  ncRNA 1..20: ncRNA_class = sgRNA
gagtccaatcagtcctgcac

SEQ ID NO: 2640 - RNA, 20 nt, synthetic construct
  source 1..20: mol_type = other RNA
  ncRNA 1..20: ncRNA_class = sgRNA
cagagaccagcccgaggatg

SEQ ID NO: 2641 - RNA, 20 nt, synthetic construct
  source 1..20: mol_type = other RNA
  ncRNA 1..20: ncRNA_class = sgRNA
gtctgtcagggcacatgtgt

SEQ ID NO: 2642 - RNA, 20 nt, synthetic construct
  source 1..20: mol_type = other RNA
  ncRNA 1..20: ncRNA_class = sgRNA
agtccaatcagtcctgcaca

SEQ ID NO: 2643 - RNA, 20 nt, synthetic construct
  source 1..20: mol_type = other RNA
  ncRNA 1..20: ncRNA_class = sgRNA
gatatgtgctacccagatca

SEQ ID NO: 2644 - RNA, 20 nt, synthetic construct
  source 1..20: mol_type = other RNA
  ncRNA 1..20: ncRNA_class = sgRNA
gcgcgccgagactccttcgc

SEQ ID NO: 2645 - RNA, 20 nt, synthetic construct
  source 1..20: mol_type = other RNA
  ncRNA 1..20: ncRNA_class = sgRNA
ggttcacagtcctccccagg

SEQ ID NO: 2646 - RNA, 20 nt, synthetic construct
  source 1..20: mol_type = other RNA
  ncRNA 1..20: ncRNA_class = sgRNA
ctgctggcttcttcttcagg

SEQ ID NO: 2647 - RNA, 20 nt, synthetic construct
  source 1..20: mol_type = other RNA
  ncRNA 1..20: ncRNA_class = sgRNA
cgccgccgcgccctcctgcg

SEQ ID NO: 2648 - RNA, 20 nt, synthetic construct
  source 1..20: mol_type = other RNA
  ncRNA 1..20: ncRNA_class = sgRNA
cacgttcatctccagcgggc

SEQ ID NO: 2649 - RNA, 20 nt, synthetic construct
  source 1..20: mol_type = other RNA
  ncRNA 1..20: ncRNA_class = sgRNA
ggaggactgtgaacccctcg

SEQ ID NO: 2650 - RNA, 20 nt, synthetic construct
  source 1..20: mol_type = other RNA
  ncRNA 1..20: ncRNA_class = sgRNA
tgcagacatctgcccagttg

SEQ ID NO: 2651 - RNA, 20 nt, synthetic construct
  source 1..20: mol_type = other RNA
  ncRNA 1..20: ncRNA_class = sgRNA
gccccagtgcgcctatggca

SEQ ID NO: 2652 - RNA, 20 nt, synthetic construct
  source 1..20: mol_type = other RNA
  ncRNA 1..20: ncRNA_class = sgRNA
gacctcgcaggagggcgcgg

SEQ ID NO: 2653 - RNA, 20 nt, synthetic construct
  source 1..20: mol_type = other RNA
  ncRNA 1..20: ncRNA_class = sgRNA
atttgcttccaggctcagtg

SEQ ID NO: 2654 - RNA, 20 nt, synthetic construct
  source 1..20: mol_type = other RNA
  ncRNA 1..20: ncRNA_class = sgRNA
ggaggctcccaagctcagcg

SEQ ID NO: 2655 - RNA, 20 nt, synthetic construct
  source 1..20: mol_type = other RNA
  ncRNA 1..20: ncRNA_class = sgRNA
gttcacagtcctccccagga

SEQ ID NO: 2656 - RNA, 20 nt, synthetic construct
  source 1..20: mol_type = other RNA
  ncRNA 1..20: ncRNA_class = sgRNA
agaagaagccagcaggacgg

SEQ ID NO: 2657 - RNA, 20 nt, synthetic construct
  source 1..20: mol_type = other RNA
  ncRNA 1..20: ncRNA_class = sgRNA
acagtggccattgcccgcac

SEQ ID NO: 2658 - RNA, 20 nt, synthetic construct
  source 1..20: mol_type = other RNA
  ncRNA 1..20: ncRNA_class = sgRNA
ggtcagcagggagcatgtga

SEQ ID NO: 2659 - RNA, 20 nt, synthetic construct
  source 1..20: mol_type = other RNA
  ncRNA 1..20: ncRNA_class = sgRNA
tccaggggttcagagaaagg

SEQ ID NO: 2660 - RNA, 20 nt, synthetic construct
  source 1..20: mol_type = other RNA
  ncRNA 1..20: ncRNA_class = sgRNA
ccataggcgcactggggcaa

SEQ ID NO: 2661 - RNA, 20 nt, synthetic construct
  source 1..20: mol_type = other RNA
  ncRNA 1..20: ncRNA_class = sgRNA
tctgtgtccccgtgaagcac

SEQ ID NO: 2662 - RNA, 20 nt, synthetic construct
  source 1..20: mol_type = other RNA
  ncRNA 1..20: ncRNA_class = sgRNA
cgggcaggtgatgaacttca

SEQ ID NO: 2663 - RNA, 20 nt, synthetic construct
  source 1..20: mol_type = other RNA
  ncRNA 1..20: ncRNA_class = sgRNA
cccttgccccagtgcgccta

SEQ ID NO: 2664 - RNA, 20 nt, synthetic construct
  source 1..20: mol_type = other RNA
  ncRNA 1..20: ncRNA_class = sgRNA
tcctgcaccgggcggcccat

SEQ ID NO: 2665 - RNA, 20 nt, synthetic construct
  source 1..20: mol_type = other RNA
  ncRNA 1..20: ncRNA_class = sgRNA
gctgaccaatgagagcatcc

SEQ ID NO: 2666 - RNA, 20 nt, synthetic construct
  source 1..20: mol_type = other RNA
  ncRNA 1..20: ncRNA_class = sgRNA
gcatcttcgccttgtgcgta

SEQ ID NO: 2667 - RNA, 20 nt, synthetic construct
  source 1..20: mol_type = other RNA
  ncRNA 1..20: ncRNA_class = sgRNA
tggggctggctgcccagtgc

SEQ ID NO: 2668 - RNA, 20 nt, synthetic construct
  source 1..20: mol_type = other RNA
  ncRNA 1..20: ncRNA_class = sgRNA
accaggggagcttccagacc

SEQ ID NO: 2669 - RNA, 20 nt, synthetic construct
  source 1..20: mol_type = other RNA
  ncRNA 1..20: ncRNA_class = sgRNA
ggggcaagggtccacgtttt

SEQ ID NO: 2670 - RNA, 20 nt, synthetic construct
  source 1..20: mol_type = other RNA
  ncRNA 1..20: ncRNA_class = sgRNA
gaagctgtcttcctctatct

SEQ ID NO: 2671 - RNA, 20 nt, synthetic construct
  source 1..20: mol_type = other RNA
  ncRNA 1..20: ncRNA_class = sgRNA
ccggctcccgcagcccctcg

SEQ ID NO: 2672 - RNA, 20 nt, synthetic construct
  source 1..20: mol_type = other RNA
  ncRNA 1..20: ncRNA_class = sgRNA
aactgggcagatgtctgcac

SEQ ID NO: 2673 - RNA, 20 nt, synthetic construct
  source 1..20: mol_type = other RNA
  ncRNA 1..20: ncRNA_class = sgRNA
gccggagaaggcctcgaggc

SEQ ID NO: 2674 - RNA, 20 nt, synthetic construct
  source 1..20: mol_type = other RNA
  ncRNA 1..20: ncRNA_class = sgRNA
actgcactgagcccctgtgc

SEQ ID NO: 2675 - RNA, 20 nt, synthetic construct
  source 1..20: mol_type = other RNA
  ncRNA 1..20: ncRNA_class = sgRNA
cctgctggcttcttcttcag

SEQ ID NO: 2676 - RNA, 20 nt, synthetic construct
  source 1..20: mol_type = other RNA
  ncRNA 1..20: ncRNA_class = sgRNA
gccataggcgcactggggca

SEQ ID NO: 2677 - RNA, 20 nt, synthetic construct
  source 1..20: mol_type = other RNA
  ncRNA 1..20: ncRNA_class = sgRNA
ggacccgtgcggcggccccg

SEQ ID NO: 2678 - RNA, 20 nt, synthetic construct
  source 1..20: mol_type = other RNA
  ncRNA 1..20: ncRNA_class = sgRNA
ctggtggctgccatcatctt

SEQ ID NO: 2679 - RNA, 20 nt, synthetic construct
  source 1..20: mol_type = other RNA
  ncRNA 1..20: ncRNA_class = sgRNA
aggctgccggaaccctcctg

SEQ ID NO: 2680 - RNA, 20 nt, synthetic construct
  source 1..20: mol_type = other RNA
  ncRNA 1..20: ncRNA_class = sgRNA
atagcaaacgccaaagatga

SEQ ID NO: 2681 - RNA, 20 nt, synthetic construct
  source 1..20: mol_type = other RNA
  ncRNA 1..20: ncRNA_class = sgRNA
cccctgaagaagaagccagc

SEQ ID NO: 2682 - RNA, 20 nt, synthetic construct
  source 1..20: mol_type = other RNA
  ncRNA 1..20: ncRNA_class = sgRNA
tccatgtattcatcttctgt

SEQ ID NO: 2683 - RNA, 20 nt, synthetic construct
  source 1..20: mol_type = other RNA
  ncRNA 1..20: ncRNA_class = sgRNA
gggagccggagaaggcctcg

SEQ ID NO: 2684 - RNA, 20 nt, synthetic construct
  source 1..20: mol_type = other RNA
  ncRNA 1..20: ncRNA_class = sgRNA
tggggcaagggtccacgttt

SEQ ID NO: 2685 - RNA, 20 nt, synthetic construct
  source 1..20: mol_type = other RNA
  ncRNA 1..20: ncRNA_class = sgRNA
cgttccccgcgaaggagtct

SEQ ID NO: 2686 - RNA, 20 nt, synthetic construct
  source 1..20: mol_type = other RNA
  ncRNA 1..20: ncRNA_class = sgRNA
aggggttcacagtcctcccc

SEQ ID NO: 2687 - RNA, 20 nt, synthetic construct
  source 1..20: mol_type = other RNA
  ncRNA 1..20: ncRNA_class = sgRNA
cttcaagggcgacatcatcg

SEQ ID NO: 2688 - RNA, 20 nt, synthetic construct
  source 1..20: mol_type = other RNA
  ncRNA 1..20: ncRNA_class = sgRNA
tggctgcccagtgcgggcaa

SEQ ID NO: 2689 - RNA, 20 nt, synthetic construct
  source 1..20: mol_type = other RNA
  ncRNA 1..20: ncRNA_class = sgRNA
ctgccggaaccctcctgggg

SEQ ID NO: 2690 - RNA, 20 nt, synthetic construct
  source 1..20: mol_type = other RNA
  ncRNA 1..20: ncRNA_class = sgRNA
ccgcgccctcctgcgaggtc

SEQ ID NO: 2691 - RNA, 20 nt, synthetic construct
  source 1..20: mol_type = other RNA
  ncRNA 1..20: ncRNA_class = sgRNA
gacccgtgcggcggccccga

SEQ ID NO: 2692 - RNA, 20 nt, synthetic construct
  source 1..20: mol_type = other RNA
  ncRNA 1..20: ncRNA_class = sgRNA
ccgcacgggtccgggaagcg

SEQ ID NO: 2693 - RNA, 20 nt, synthetic construct
  source 1..20: mol_type = other RNA
  ncRNA 1..20: ncRNA_class = sgRNA
cgagactccttcgcggggaa

SEQ ID NO: 2694 - RNA, 20 nt, synthetic construct
  source 1..20: mol_type = other RNA
  ncRNA 1..20: ncRNA_class = sgRNA
atgcaggggactggccacca

SEQ ID NO: 2695 - RNA, 20 nt, synthetic construct
  source 1..20: mol_type = other RNA
  ncRNA 1..20: ncRNA_class = sgRNA
ggcccatgccataggcgcac

SEQ ID NO: 2696 - RNA, 20 nt, synthetic construct
  source 1..20: mol_type = other RNA
  ncRNA 1..20: ncRNA_class = sgRNA
tcctttctctgaacccctgg

SEQ ID NO: 2697 - RNA, 20 nt, synthetic construct
  source 1..20: mol_type = other RNA
  ncRNA 1..20: ncRNA_class = sgRNA
ccgaggatggggctgatggg

SEQ ID NO: 2698 - RNA, 20 nt, synthetic construct
  source 1..20: mol_type = other RNA
  ncRNA 1..20: ncRNA_class = sgRNA
actccacgttcatctccagc

SEQ ID NO: 2699 - RNA, 20 nt, synthetic construct
  source 1..20: mol_type = other RNA
  ncRNA 1..20: ncRNA_class = sgRNA
tcggggccgccgcacgggtc

SEQ ID NO: 2700 - RNA, 20 nt, synthetic construct
  source 1..20: mol_type = other RNA
  ncRNA 1..20: ncRNA_class = sgRNA
gccagagaccagcccgagga

SEQ ID NO: 2701 - RNA, 20 nt, synthetic construct
  source 1..20: mol_type = other RNA
  ncRNA 1..20: ncRNA_class = sgRNA
ctcctgcaccgggcggccca

SEQ ID NO: 2702 - RNA, 20 nt, synthetic construct
  source 1..20: mol_type = other RNA
  ncRNA 1..20: ncRNA_class = sgRNA
tgaaaactacttgcaaaaag

SEQ ID NO: 2703 - RNA, 20 nt, synthetic construct
  source 1..20: mol_type = other RNA
  ncRNA 1..20: ncRNA_class = sgRNA
caggctgccggaaccctcct

SEQ ID NO: 2704 - RNA, 20 nt, synthetic construct
  source 1..20: mol_type = other RNA
  ncRNA 1..20: ncRNA_class = sgRNA
cagtttaagccagtgcttca

SEQ ID NO: 2705 - RNA, 20 nt, synthetic construct
  source 1..20: mol_type = other RNA
  ncRNA 1..20: ncRNA_class = sgRNA
gaaggcctcgaggccggtgc

SEQ ID NO: 2706 - RNA, 20 nt, synthetic construct
  source 1..20: mol_type = other RNA
  ncRNA 1..20: ncRNA_class = sgRNA
agtcctccccaggagggttc

SEQ ID NO: 2707 - RNA, 20 nt, synthetic construct
  source 1..20: mol_type = other RNA
  ncRNA 1..20: ncRNA_class = sgRNA
gcccctcggggccgccgcac

SEQ ID NO: 2708 - RNA, 20 nt, synthetic construct
  source 1..20: mol_type = other RNA
  ncRNA 1..20: ncRNA_class = sgRNA
gggtctggaagctcccctgg

SEQ ID NO: 2709 - RNA, 20 nt, synthetic construct
  source 1..20: mol_type = other RNA
  ncRNA 1..20: ncRNA_class = sgRNA
taactggtctgtgggctggg

SEQ ID NO: 2710 - RNA, 20 nt, synthetic construct
  source 1..20: mol_type = other RNA
  ncRNA 1..20: ncRNA_class = sgRNA
catgggccgcccggtgcagg

SEQ ID NO: 2711 - RNA, 20 nt, synthetic construct
  source 1..20: mol_type = other RNA
  ncRNA 1..20: ncRNA_class = sgRNA
tgtcttactgctgactctgg

SEQ ID NO: 2712 - RNA, 20 nt, synthetic construct
  source 1..20: mol_type = other RNA
  ncRNA 1..20: ncRNA_class = sgRNA
agtttaagccagtgcttcac

SEQ ID NO: 2713 - RNA, 20 nt, synthetic construct
  source 1..20: mol_type = other RNA
  ncRNA 1..20: ncRNA_class = sgRNA
acctccaggggttcagagaa

SEQ ID NO: 2714 - RNA, 20 nt, synthetic construct
  source 1..20: mol_type = other RNA
  ncRNA 1..20: ncRNA_class = sgRNA
tcatctttggcgtttgctat

SEQ ID NO: 2715 - RNA, 20 nt, synthetic construct
  source 1..20: mol_type = other RNA
  ncRNA 1..20: ncRNA_class = sgRNA
cagtaactggtctgtgggct

SEQ ID NO: 2716 - RNA, 20 nt, synthetic construct
  source 1..20: mol_type = other RNA
  ncRNA 1..20: ncRNA_class = sgRNA
ccagacctcgcaggagggcg

SEQ ID NO: 2717 - RNA, 20 nt, synthetic construct
  source 1..20: mol_type = other RNA
  ncRNA 1..20: ncRNA_class = sgRNA
ggaggccagagaccagcccg

SEQ ID NO: 2718 - RNA, 20 nt, synthetic construct
  source 1..20: mol_type = other RNA
  ncRNA 1..20: ncRNA_class = sgRNA
tgcaggggactggccaccag

SEQ ID NO: 2719 - RNA, 20 nt, synthetic construct
  source 1..20: mol_type = other RNA
  ncRNA 1..20: ncRNA_class = sgRNA
cccggtgcaggaggagaccc

SEQ ID NO: 2720 - RNA, 20 nt, synthetic construct
  source 1..20: mol_type = other RNA
  ncRNA 1..20: ncRNA_class = sgRNA
aactccacgttcatctccag

SEQ ID NO: 2721 - RNA, 20 nt, synthetic construct
  source 1..20: mol_type = other RNA
  ncRNA 1..20: ncRNA_class = sgRNA
gcgagggcaggtgccgggtc

SEQ ID NO: 2722 - RNA, 20 nt, synthetic construct
  source 1..20: mol_type = other RNA
  ncRNA 1..20: ncRNA_class = sgRNA
acaggctgccggaaccctcc

SEQ ID NO: 2723 - RNA, 20 nt, synthetic construct
  source 1..20: mol_type = other RNA
  ncRNA 1..20: ncRNA_class = sgRNA
cacctgccctcgctgagctt

SEQ ID NO: 2724 - RNA, 20 nt, synthetic construct
  source 1..20: mol_type = other RNA
  ncRNA 1..20: ncRNA_class = sgRNA
accggcctcgaggccttctc

SEQ ID NO: 2725 - RNA, 20 nt, synthetic construct
  source 1..20: mol_type = other RNA
  ncRNA 1..20: ncRNA_class = sgRNA
agccagccccagccccaact

SEQ ID NO: 2726 - RNA, 20 nt, synthetic construct
  source 1..20: mol_type = other RNA
  ncRNA 1..20: ncRNA_class = sgRNA
ggggaacggcccgcgcttcc

SEQ ID NO: 2727 - RNA, 20 nt, synthetic construct
  source 1..20: mol_type = other RNA
  ncRNA 1..20: ncRNA_class = sgRNA
cccatcctcgggctggtctc

SEQ ID NO: 2728 - RNA, 20 nt, synthetic construct
  source 1..20: mol_type = other RNA
  ncRNA 1..20: ncRNA_class = sgRNA
tgtgcagacatctgcccagt

SEQ ID NO: 2729 - RNA, 20 nt, synthetic construct
  source 1..20: mol_type = other RNA
  ncRNA 1..20: ncRNA_class = sgRNA
ggcatcttcgccttgtgcgt

SEQ ID NO: 2730 - RNA, 20 nt, synthetic construct
  source 1..20: mol_type = other RNA
  ncRNA 1..20: ncRNA_class = sgRNA
ggcgtttgctataggaaaaa

SEQ ID NO: 2731 - RNA, 20 nt, synthetic construct
  source 1..20: mol_type = other RNA
  ncRNA 1..20: ncRNA_class = sgRNA
aaagatgatggcagccacca

SEQ ID NO: 2732 - RNA, 20 nt, synthetic construct
  source 1..20: mol_type = other RNA
  ncRNA 1..20: ncRNA_class = sgRNA
gacagacaccaccttgatct

SEQ ID NO: 2733 - RNA, 20 nt, synthetic construct
  source 1..20: mol_type = other RNA
  ncRNA 1..20: ncRNA_class = sgRNA
acagtaactggtctgtgggc

SEQ ID NO: 2734 - RNA, 20 nt, synthetic construct
  source 1..20: mol_type = other RNA
  ncRNA 1..20: ncRNA_class = sgRNA
gtccatgtattcatcttctg

SEQ ID NO: 2735 - RNA, 20 nt, synthetic construct
  source 1..20: mol_type = other RNA
  ncRNA 1..20: ncRNA_class = sgRNA
gctcagtgaggaacagtaac

SEQ ID NO: 2736 - RNA, 20 nt, synthetic construct
  source 1..20: mol_type = other RNA
  ncRNA 1..20: ncRNA_class = sgRNA
cacggcaaactttggtcagc

SEQ ID NO: 2737 - RNA, 20 nt, synthetic construct
  source 1..20: mol_type = other RNA
  ncRNA 1..20: ncRNA_class = sgRNA
agcccctgtgcaggactgat

SEQ ID NO: 2738 - RNA, 20 nt, synthetic construct
  source 1..20: mol_type = other RNA
  ncRNA 1..20: ncRNA_class = sgRNA
agcccgaggatggggctgat

SEQ ID NO: 2739 - RNA, 20 nt, synthetic construct
  source 1..20: mol_type = other RNA
  ncRNA 1..20: ncRNA_class = sgRNA
acctcctttctctgaacccc

SEQ ID NO: 2740 - RNA, 20 nt, synthetic construct
  source 1..20: mol_type = other RNA
  ncRNA 1..20: ncRNA_class = sgRNA
gcacctgccctcgctgagct

SEQ ID NO: 2741 - RNA, 20 nt, synthetic construct
  source 1..20: mol_type = other RNA
  ncRNA 1..20: ncRNA_class = sgRNA
cagaagatgaatacatggac

SEQ ID NO: 2742 - RNA, 20 nt, synthetic construct
  source 1..20: mol_type = other RNA
  ncRNA 1..20: ncRNA_class = sgRNA
gccccgccttgctcctgcac

SEQ ID NO: 2743 - RNA, 20 nt, synthetic construct
  source 1..20: mol_type = other RNA
  ncRNA 1..20: ncRNA_class = sgRNA
gcccatgggccgcccggtgc

SEQ ID NO: 2744 - RNA, 20 nt, synthetic construct
  source 1..20: mol_type = other RNA
  ncRNA 1..20: ncRNA_class = sgRNA
cgcacgggtccgggaagcgc

SEQ ID NO: 2745 - RNA, 20 nt, synthetic construct
  source 1..20: mol_type = other RNA
  ncRNA 1..20: ncRNA_class = sgRNA
ccagagaccagcccgaggat

SEQ ID NO: 2746 - RNA, 20 nt, synthetic construct
  source 1..20: mol_type = other RNA
  ncRNA 1..20: ncRNA_class = sgRNA
ggaggtgtggatttgcttcc

SEQ ID NO: 2747 - RNA, 20 nt, synthetic construct
  source 1..20: mol_type = other RNA
  ncRNA 1..20: ncRNA_class = sgRNA
tttttgcaagtagttttcag

SEQ ID NO: 2748 - RNA, 20 nt, synthetic construct
  source 1..20: mol_type = other RNA
  ncRNA 1..20: ncRNA_class = sgRNA
caagtagttttcagaggaca

SEQ ID NO: 2749 - RNA, 20 nt, synthetic construct
  source 1..20: mol_type = other RNA
  ncRNA 1..20: ncRNA_class = sgRNA
tgcggagcccatgggccgcc

SEQ ID NO: 2750 - RNA, 20 nt, synthetic construct
  source 1..20: mol_type = other RNA
  ncRNA 1..20: ncRNA_class = sgRNA
tcattctcccccacctccag

SEQ ID NO: 2751 - RNA, 20 nt, synthetic construct
  source 1..20: mol_type = other RNA
  ncRNA 1..20: ncRNA_class = sgRNA
ctggggctggctgcccagtg

SEQ ID NO: 2752 - RNA, 20 nt, synthetic construct
  source 1..20: mol_type = other RNA
  ncRNA 1..20: ncRNA_class = sgRNA
aaactacttgcaaaaagagg

SEQ ID NO: 2753 - RNA, 20 nt, synthetic construct
  source 1..20: mol_type = other RNA
  ncRNA 1..20: ncRNA_class = sgRNA
gctcagcgagggcaggtgcc

SEQ ID NO: 2754 - RNA, 20 nt, synthetic construct
  source 1..20: mol_type = other RNA
  ncRNA 1..20: ncRNA_class = sgRNA
ccagggtctcctcctgcacc

SEQ ID NO: 2755 - RNA, 20 nt, synthetic construct
  source 1..20: mol_type = other RNA
  ncRNA 1..20: ncRNA_class = sgRNA
caaagatgatggcagccacc

SEQ ID NO: 2756 - RNA, 20 nt, synthetic construct
  source 1..20: mol_type = other RNA
  ncRNA 1..20: ncRNA_class = sgRNA
gcggcggccccgaggggctg

SEQ ID NO: 2757 - RNA, 20 nt, synthetic construct
  source 1..20: mol_type = other RNA
  ncRNA 1..20: ncRNA_class = sgRNA
ctccggctcccgcagcccct

SEQ ID NO: 2758 - RNA, 20 nt, synthetic construct
  source 1..20: mol_type = other RNA
  ncRNA 1..20: ncRNA_class = sgRNA
cggggccgccgcacgggtcc

SEQ ID NO: 2759 - RNA, 20 nt, synthetic construct
  source 1..20: mol_type = other RNA
  ncRNA 1..20: ncRNA_class = sgRNA
agatcaaggtggtgtctgtc

SEQ ID NO: 2760 - RNA, 20 nt, synthetic construct
  source 1..20: mol_type = other RNA
  ncRNA 1..20: ncRNA_class = sgRNA
acatctgcccagttggggct

SEQ ID NO: 2761 - RNA, 20 nt, synthetic construct
  source 1..20: mol_type = other RNA
  ncRNA 1..20: ncRNA_class = sgRNA
cttcgcgtctgtggccctgg

SEQ ID NO: 2762 - RNA, 20 nt, synthetic construct
  source 1..20: mol_type = other RNA
  ncRNA 1..20: ncRNA_class = sgRNA
gatgcaggggactggccacc

SEQ ID NO: 2763 - RNA, 20 nt, synthetic construct
  source 1..20: mol_type = other RNA
  ncRNA 1..20: ncRNA_class = sgRNA
agcccctcggggccgccgca

SEQ ID NO: 2764 - RNA, 20 nt, synthetic construct
  source 1..20: mol_type = other RNA
  ncRNA 1..20: ncRNA_class = sgRNA
ttactgttcctcactgagcc

SEQ ID NO: 2765 - RNA, 20 nt, synthetic construct
  source 1..20: mol_type = other RNA
  ncRNA 1..20: ncRNA_class = sgRNA
tccggctcccgcagcccctc

SEQ ID NO: 2766 - RNA, 20 nt, synthetic construct
  source 1..20: mol_type = other RNA
  ncRNA 1..20: ncRNA_class = sgRNA
cagatgtctgcacaggctgc

SEQ ID NO: 2767 - RNA, 20 nt, synthetic construct
  source 1..20: mol_type = other RNA
  ncRNA 1..20: ncRNA_class = sgRNA
ctcccaagctcagcgagggc

SEQ ID NO: 2768 - RNA, 20 nt, synthetic construct
  source 1..20: mol_type = other RNA
  ncRNA 1..20: ncRNA_class = sgRNA
tctgggtagcacatatcttc

SEQ ID NO: 2769 - RNA, 20 nt, synthetic construct
  source 1..20: mol_type = other RNA
  ncRNA 1..20: ncRNA_class = sgRNA
gggttcagagaaaggaggtg

SEQ ID NO: 2770 - RNA, 20 nt, synthetic construct
  source 1..20: mol_type = other RNA
  ncRNA 1..20: ncRNA_class = sgRNA
cagggcacatgtgtaggagg

SEQ ID NO: 2771 - RNA, 20 nt, synthetic construct
  source 1..20: mol_type = other RNA
  ncRNA 1..20: ncRNA_class = sgRNA
tggcttcttcttcaggggga

SEQ ID NO: 2772 - RNA, 20 nt, synthetic construct
  source 1..20: mol_type = other RNA
  ncRNA 1..20: ncRNA_class = sgRNA
gccgggtctggaagctcccc

SEQ ID NO: 2773 - RNA, 20 nt, synthetic construct
  source 1..20: mol_type = other RNA
  ncRNA 1..20: ncRNA_class = sgRNA
ctcgcaggagggcgcggcgg

SEQ ID NO: 2774 - RNA, 20 nt, synthetic construct
  source 1..20: mol_type = other RNA
  ncRNA 1..20: ncRNA_class = sgRNA
ggtggccagtcccctgcatc

SEQ ID NO: 2775 - RNA, 20 nt, synthetic construct
  source 1..20: mol_type = other RNA
  ncRNA 1..20: ncRNA_class = sgRNA
catcagccccatcctcgggc

SEQ ID NO: 2776 - RNA, 20 nt, synthetic construct
  source 1..20: mol_type = other RNA
  ncRNA 1..20: ncRNA_class = sgRNA
ttctctgaacccctggaggt

SEQ ID NO: 2777 - RNA, 20 nt, synthetic construct
  source 1..20: mol_type = other RNA
  ncRNA 1..20: ncRNA_class = sgRNA
catctgcccagttggggctg

SEQ ID NO: 2778 - RNA, 20 nt, synthetic construct
  source 1..20: mol_type = other RNA
  ncRNA 1..20: ncRNA_class = sgRNA
gccagggtctcctcctgcac

SEQ ID NO: 2779 - RNA, 20 nt, synthetic construct
  source 1..20: mol_type = other RNA
  ncRNA 1..20: ncRNA_class = sgRNA
gacatctgcccagttggggc

SEQ ID NO: 2780 - RNA, 20 nt, synthetic construct
  source 1..20: mol_type = other RNA
  ncRNA 1..20: ncRNA_class = sgRNA
cggcggccccgaggggctgc

SEQ ID NO: 2781 - RNA, 20 nt, synthetic construct
  source 1..20: mol_type = other RNA
  ncRNA 1..20: ncRNA_class = sgRNA
ggcggcggctgcggagccca

SEQ ID NO: 2782 - RNA, 20 nt, synthetic construct
  source 1..20: mol_type = other RNA
  ncRNA 1..20: ncRNA_class = sgRNA
cctcccatcagccccatcct

SEQ ID NO: 2783 - RNA, 20 nt, synthetic construct
  source 1..20: mol_type = other RNA
  ncRNA 1..20: ncRNA_class = sgRNA
agctcagcgagggcaggtgc

SEQ ID NO: 2784 - RNA, 20 nt, synthetic construct
  source 1..20: mol_type = other RNA
  ncRNA 1..20: ncRNA_class = sgRNA
gtcattctcccccacctcca

SEQ ID NO: 2785 - RNA, 20 nt, synthetic construct
  source 1..20: mol_type = other RNA
  ncRNA 1..20: ncRNA_class = sgRNA
tctcttcgcgtctgtggccc

SEQ ID NO: 2786 - RNA, 20 nt, synthetic construct
  source 1..20: mol_type = other RNA
  ncRNA 1..20: ncRNA_class = sgRNA
tctctgaacccctggaggtg

SEQ ID NO: 2787 - RNA, 20 nt, synthetic construct
  source 1..20: mol_type = other RNA
  ncRNA 1..20: ncRNA_class = sgRNA
gtctctggcctccgtcctgc

SEQ ID NO: 2788 - RNA, 20 nt, synthetic construct
  source 1..20: mol_type = other RNA
  ncRNA 1..20: ncRNA_class = sgRNA
tcctgctggcttcttcttca

SEQ ID NO: 2789 - RNA, 20 nt, synthetic construct
  source 1..20: mol_type = other RNA
  ncRNA 1..20: ncRNA_class = sgRNA
cagcccgaggatggggctga

SEQ ID NO: 2790 - RNA, 20 nt, synthetic construct
  source 1..20: mol_type = other RNA
  ncRNA 1..20: ncRNA_class = sgRNA
tgacagacaccaccttgatc

SEQ ID NO: 2791 - RNA, 20 nt, synthetic construct
  source 1..20: mol_type = other RNA
  ncRNA 1..20: ncRNA_class = sgRNA
aactggtctgtgggctggga

SEQ ID NO: 2792 - RNA, 20 nt, synthetic construct
  source 1..20: mol_type = other RNA
  ncRNA 1..20: ncRNA_class = sgRNA
ggggctgcgggagccggaga

SEQ ID NO: 2793 - RNA, 20 nt, synthetic construct
  source 1..20: mol_type = other RNA
  ncRNA 1..20: ncRNA_class = sgRNA
tttctctgaacccctggagg

SEQ ID NO: 2794 - RNA, 20 nt, synthetic construct
  source 1..20: mol_type = other RNA
  ncRNA 1..20: ncRNA_class = sgRNA
ccccgaggggctgcgggagc

SEQ ID NO: 2795 - RNA, 20 nt, synthetic construct
  source 1..20: mol_type = other RNA
  ncRNA 1..20: ncRNA_class = sgRNA
ctcccatcagccccatcctc

SEQ ID NO: 2796 - RNA, 20 nt, synthetic construct
  source 1..20: mol_type = other RNA
  ncRNA 1..20: ncRNA_class = sgRNA
tgtcattctcccccacctcc

SEQ ID NO: 2797 - RNA, 20 nt, synthetic construct
  source 1..20: mol_type = other RNA
  ncRNA 1..20: ncRNA_class = sgRNA
gtcctgctggcttcttcttc

SEQ ID NO: 2798 - RNA, 20 nt, synthetic construct
  source 1..20: mol_type = other RNA
  ncRNA 1..20: ncRNA_class = sgRNA
tgcccagttggggctggggc

SEQ ID NO: 2799 - RNA, 20 nt, synthetic construct
  source 1..20: mol_type = other RNA
  ncRNA 1..20: ncRNA_class = sgRNA
aaaccgggcaagtaaacatg

SEQ ID NO: 2800 - RNA, 20 nt, synthetic construct
  source 1..20: mol_type = other RNA
  ncRNA 1..20: ncRNA_class = sgRNA
taaaccgggcaagtaaacat

SEQ ID NO: 2801 - RNA, 20 nt, synthetic construct
  source 1..20: mol_type = other RNA
  ncRNA 1..20: ncRNA_class = sgRNA
tctgcttctcttcgcgtctg

SEQ ID NO: 2802 - RNA, 20 nt, synthetic construct
  source 1..20: mol_type = other RNA
  ncRNA 1..20: ncRNA_class = sgRNA
gaaccccatgtttacttgcc

SEQ ID NO: 2803 - RNA, 20 nt, synthetic construct
  source 1..20: mol_type = other RNA
  ncRNA 1..20: ncRNA_class = sgRNA
ccagctagaaaaccaccaaa

SEQ ID NO: 2804 - RNA, 20 nt, synthetic construct
  source 1..20: mol_type = other RNA
  ncRNA 1..20: ncRNA_class = sgRNA
agaagcagaattattaaacc

SEQ ID NO: 2805 - RNA, 20 nt, synthetic construct
  source 1..20: mol_type = other RNA
  ncRNA 1..20: ncRNA_class = sgRNA
ttaaaccgggcaagtaaaca

SEQ ID NO: 2806 - RNA, 20 nt, synthetic construct
  source 1..20: mol_type = other RNA
  ncRNA 1..20: ncRNA_class = sgRNA
gagaagcagaattattaaac

SEQ ID NO: 2807 - RNA, 20 nt, synthetic construct
  source 1..20: mol_type = other RNA
  ncRNA 1..20: ncRNA_class = sgRNA
ccatttggtggttttctagc

SEQ ID NO: 2808 - RNA, 20 nt, synthetic construct
  source 1..20: mol_type = other RNA
  ncRNA 1..20: ncRNA_class = sgRNA
gccggtgcaggagcaaggcg

SEQ ID NO: 2809 - RNA, 20 nt, synthetic construct
  source 1..20: mol_type = other RNA
  ncRNA 1..20: ncRNA_class = sgRNA
catggggggcgctcaagcct

SEQ ID NO: 2810 - RNA, 20 nt, synthetic construct
  source 1..20: mol_type = other RNA
  ncRNA 1..20: ncRNA_class = sgRNA
ggccggtgcaggagcaaggc

SEQ ID NO: 2811 - RNA, 20 nt, synthetic construct
  source 1..20: mol_type = other RNA
  ncRNA 1..20: ncRNA_class = sgRNA
gcaggagcaaggcggggcca

SEQ ID NO: 2812 - RNA, 20 nt, synthetic construct
  source 1..20: mol_type = other RNA
  ncRNA 1..20: ncRNA_class = sgRNA
cttaacccaaatgaacacaa

SEQ ID NO: 2813 - RNA, 20 nt, synthetic construct
  source 1..20: mol_type = other RNA
  ncRNA 1..20: ncRNA_class = sgRNA
gaggcttgttctgtagatac

SEQ ID NO: 2814 - RNA, 20 nt, synthetic construct
  source 1..20: mol_type = other RNA
  ncRNA 1..20: ncRNA_class = sgRNA
atgtggctgaaaagcataga

SEQ ID NO: 2815 - RNA, 20 nt, synthetic construct
  source 1..20: mol_type = other RNA
  ncRNA 1..20: ncRNA_class = sgRNA
ttggtttgttcctgctaagg

SEQ ID NO: 2816 - RNA, 20 nt, synthetic construct
  source 1..20: mol_type = other RNA
  ncRNA 1..20: ncRNA_class = sgRNA
ttcaggacattactattgcg

SEQ ID NO: 2817 - RNA, 20 nt, synthetic construct
  source 1..20: mol_type = other RNA
  ncRNA 1..20: ncRNA_class = sgRNA
aagcagaaactacccgttgc

SEQ ID NO: 2818 - RNA, 20 nt, synthetic construct
  source 1..20: mol_type = other RNA
  ncRNA 1..20: ncRNA_class = sgRNA
taggctcatcgtgatgaatg

SEQ ID NO: 2819 - RNA, 20 nt, synthetic construct
  source 1..20: mol_type = other RNA
  ncRNA 1..20: ncRNA_class = sgRNA
aatgtggctgaaaagcatag

SEQ ID NO: 2820 - RNA, 20 nt, synthetic construct
  source 1..20: mol_type = other RNA
  ncRNA 1..20: ncRNA_class = sgRNA
catgcatcctacacatactt

SEQ ID NO: 2821 - RNA, 20 nt, synthetic construct
  source 1..20: mol_type = other RNA
  ncRNA 1..20: ncRNA_class = sgRNA
gcaagcaatatcctattacc

SEQ ID NO: 2822 - RNA, 20 nt, synthetic construct
  source 1..20: mol_type = other RNA
  ncRNA 1..20: ncRNA_class = sgRNA
caagcaatatcctattaccc

SEQ ID NO: 2823 - RNA, 20 nt, synthetic construct
  source 1..20: mol_type = other RNA
  ncRNA 1..20: ncRNA_class = sgRNA
gagcccagctaatgagacaa

SEQ ID NO: 2824 - RNA, 20 nt, synthetic construct
  source 1..20: mol_type = other RNA
  ncRNA 1..20: ncRNA_class = sgRNA
agcaatgtcactcaactggc

SEQ ID NO: 2825 - RNA, 20 nt, synthetic construct
  source 1..20: mol_type = other RNA
  ncRNA 1..20: ncRNA_class = sgRNA
tatatccagttaatatatcc

SEQ ID NO: 2826 - RNA, 20 nt, synthetic construct
  source 1..20: mol_type = other RNA
  ncRNA 1..20: ncRNA_class = sgRNA
tggaagggatgactacgttg

SEQ ID NO: 2827 - RNA, 20 nt, synthetic construct
  source 1..20: mol_type = other RNA
  ncRNA 1..20: ncRNA_class = sgRNA
agggatgactacgttgggga

SEQ ID NO: 2828 - RNA, 20 nt, synthetic construct
  source 1..20: mol_type = other RNA
  ncRNA 1..20: ncRNA_class = sgRNA
acatcaggcttcagctggct

SEQ ID NO: 2829 - RNA, 20 nt, synthetic construct
  source 1..20: mol_type = other RNA
  ncRNA 1..20: ncRNA_class = sgRNA
ctgaacaagagcattataca

SEQ ID NO: 2830 - RNA, 20 nt, synthetic construct
  source 1..20: mol_type = other RNA
  ncRNA 1..20: ncRNA_class = sgRNA
gtgtaaagtcccctgaccag

SEQ ID NO: 2831 - RNA, 20 nt, synthetic construct
  source 1..20: mol_type = other RNA
  ncRNA 1..20: ncRNA_class = sgRNA
atggggctatccgctggtca

SEQ ID NO: 2832 - RNA, 20 nt, synthetic construct
  source 1..20: mol_type = other RNA
  ncRNA 1..20: ncRNA_class = sgRNA
tggggctatccgctggtcag

SEQ ID NO: 2833 - RNA, 20 nt, synthetic construct
  source 1..20: mol_type = other RNA
  ncRNA 1..20: ncRNA_class = sgRNA
ctggtcaggggactttacac

SEQ ID NO: 2834 - RNA, 20 nt, synthetic construct
  source 1..20: mol_type = other RNA
  ncRNA 1..20: ncRNA_class = sgRNA
tggtcaggggactttacaca

SEQ ID NO: 2835 - RNA, 20 nt, synthetic construct
  source 1..20: mol_type = other RNA
  ncRNA 1..20: ncRNA_class = sgRNA
actggggactagacaccatg

SEQ ID NO: 2836 - RNA, 20 nt, synthetic construct
  source 1..20: mol_type = other RNA
  ncRNA 1..20: ncRNA_class = sgRNA
cagctggccttactctgatc

SEQ ID NO: 2837 - RNA, 20 nt, synthetic construct
  source 1..20: mol_type = other RNA
  ncRNA 1..20: ncRNA_class = sgRNA
gatctggtattggactaggc

SEQ ID NO: 2838 - RNA, 20 nt, synthetic construct
  source 1..20: mol_type = other RNA
  ncRNA 1..20: ncRNA_class = sgRNA
ccttactaatgcggttctcg

SEQ ID NO: 2839 - RNA, 20 nt, synthetic construct
  source 1..20: mol_type = other RNA
  ncRNA 1..20: ncRNA_class = sgRNA
atgcactgggagtttcatgg

SEQ ID NO: 2840 - RNA, 20 nt, synthetic construct
  source 1..20: mol_type = other RNA
  ncRNA 1..20: ncRNA_class = sgRNA
tatgcactgggagtttcatg

SEQ ID NO: 2841 - RNA, 20 nt, synthetic construct
  source 1..20: mol_type = other RNA
  ncRNA 1..20: ncRNA_class = sgRNA
atatagaatatggcattcag

SEQ ID NO: 2842 - RNA, 20 nt, synthetic construct
  source 1..20: mol_type = other RNA
  ncRNA 1..20: ncRNA_class = sgRNA
atagtcggtttgacactgga

SEQ ID NO: 2843 - RNA, 20 nt, synthetic construct
  source 1..20: mol_type = other RNA
  ncRNA 1..20: ncRNA_class = sgRNA
agtgatagtcggtttgacac

SEQ ID NO: 2844 - RNA, 20 nt, synthetic construct
  source 1..20: mol_type = other RNA
  ncRNA 1..20: ncRNA_class = sgRNA
gaaactcaagttcatacctt

SEQ ID NO: 2845 - RNA, 20 nt, synthetic construct
  source 1..20: mol_type = other RNA
  ncRNA 1..20: ncRNA_class = sgRNA
gtggtctatgagaaagaacc

SEQ ID NO: 2846 - RNA, 20 nt, synthetic construct
  source 1..20: mol_type = other RNA
  ncRNA 1..20: ncRNA_class = sgRNA
ggagctactcattccctgta

SEQ ID NO: 2847 - RNA, 20 nt, synthetic construct
  source 1..20: mol_type = other RNA
  ncRNA 1..20: ncRNA_class = sgRNA
aaactaaaatagaccgtaca

SEQ ID NO: 2848 - RNA, 20 nt, synthetic construct
  source 1..20: mol_type = other RNA
  ncRNA 1..20: ncRNA_class = sgRNA
gaggtttggtggaccattga

SEQ ID NO: 2849 - RNA, 20 nt, synthetic construct
  source 1..20: mol_type = other RNA
  ncRNA 1..20: ncRNA_class = sgRNA
ttgatgtcaccattaacgaa

SEQ ID NO: 2850 - RNA, 20 nt, synthetic construct
  source 1..20: mol_type = other RNA
  ncRNA 1..20: ncRNA_class = sgRNA
gctgcgcttgagatcctcag

SEQ ID NO: 2851 - RNA, 20 nt, synthetic construct
  source 1..20: mol_type = other RNA
  ncRNA 1..20: ncRNA_class = sgRNA
gccagctccaagatacacag

SEQ ID NO: 2852 - RNA, 20 nt, synthetic construct
  source 1..20: mol_type = other RNA
  ncRNA 1..20: ncRNA_class = sgRNA
tacacagtggaactggcttg

SEQ ID NO: 2853 - RNA, 20 nt, synthetic construct
  source 1..20: mol_type = other RNA
  ncRNA 1..20: ncRNA_class = sgRNA
aatcaccactagcaggactg

SEQ ID NO: 2854 - RNA, 20 nt, synthetic construct
  source 1..20: mol_type = other RNA
  ncRNA 1..20: ncRNA_class = sgRNA
tgtatcctatgcaaggaatg

SEQ ID NO: 2855 - RNA, 20 nt, synthetic construct
  source 1..20: mol_type = other RNA
  ncRNA 1..20: ncRNA_class = sgRNA
tttgtattactgaccctccg

SEQ ID NO: 2856 - RNA, 20 nt, synthetic construct
  source 1..20: mol_type = other RNA
  ncRNA 1..20: ncRNA_class = sgRNA
attctccaaaactccacgga

SEQ ID NO: 2857 - RNA, 20 nt, synthetic construct
  source 1..20: mol_type = other RNA
  ncRNA 1..20: ncRNA_class = sgRNA
cattctccaaaactccacgg

SEQ ID NO: 2858 - RNA, 20 nt, synthetic construct
  source 1..20: mol_type = other RNA
  ncRNA 1..20: ncRNA_class = sgRNA
ttgaccgagacagtctgcct

SEQ ID NO: 2859 - RNA, 20 nt, synthetic construct
  source 1..20: mol_type = other RNA
  ncRNA 1..20: ncRNA_class = sgRNA
tgaccgagacagtctgcctg

SEQ ID NO: 2860 - RNA, 20 nt, synthetic construct
  source 1..20: mol_type = other RNA
  ncRNA 1..20: ncRNA_class = sgRNA
gaccgagacagtctgcctgg

SEQ ID NO: 2861 - RNA, 20 nt, synthetic construct
  source 1..20: mol_type = other RNA
  ncRNA 1..20: ncRNA_class = sgRNA
tggggcttagaacaaccagg

SEQ ID NO: 2862 - RNA, 20 nt, synthetic construct
  source 1..20: mol_type = other RNA
  ncRNA 1..20: ncRNA_class = sgRNA
agccccaactacgtgctcca

SEQ ID NO: 2863 - RNA, 20 nt, synthetic construct
  source 1..20: mol_type = other RNA
  ncRNA 1..20: ncRNA_class = sgRNA
ctagaaaatatggcctctcg

SEQ ID NO: 2864 - RNA, 20 nt, synthetic construct
  source 1..20: mol_type = other RNA
  ncRNA 1..20: ncRNA_class = sgRNA
gacgttgatgttgccccgag

SEQ ID NO: 2865 - RNA, 20 nt, synthetic construct
  source 1..20: mol_type = other RNA
  ncRNA 1..20: ncRNA_class = sgRNA
ccaaggcgctgccctgcgca

SEQ ID NO: 2866 - RNA, 20 nt, synthetic construct
  source 1..20: mol_type = other RNA
  ncRNA 1..20: ncRNA_class = sgRNA
cagcgtgactctgacctgcc

SEQ ID NO: 2867 - RNA, 20 nt, synthetic construct
  source 1..20: mol_type = other RNA
  ncRNA 1..20: ncRNA_class = sgRNA
gcgtgactctgacctgcccg

SEQ ID NO: 2868 - RNA, 20 nt, synthetic construct
  source 1..20: mol_type = other RNA
  ncRNA 1..20: ncRNA_class = sgRNA
cgtgactctgacctgcccgg

SEQ ID NO: 2869 - RNA, 20 nt, synthetic construct
  source 1..20: mol_type = other RNA
  ncRNA 1..20: ncRNA_class = sgRNA
cctgagcacccagtgaacag

SEQ ID NO: 2870 - RNA, 20 nt, synthetic construct
  source 1..20: mol_type = other RNA
  ncRNA 1..20: ncRNA_class = sgRNA
tcggtgcagctccacgactc

SEQ ID NO: 2871 - RNA, 20 nt, synthetic construct
  source 1..20: mol_type = other RNA
  ncRNA 1..20: ncRNA_class = sgRNA
atgaatagtttccagagtcg

SEQ ID NO: 2872 - RNA, 20 nt, synthetic construct
  source 1..20: mol_type = other RNA
  ncRNA 1..20: ncRNA_class = sgRNA
agtgcacagtcccagctggg

SEQ ID NO: 2873 - RNA, 20 nt, synthetic construct
  source 1..20: mol_type = other RNA
  ncRNA 1..20: ncRNA_class = sgRNA
gtcagggatggggtgctccg

SEQ ID NO: 2874 - RNA, 20 nt, synthetic construct
  source 1..20: mol_type = other RNA
  ncRNA 1..20: ncRNA_class = sgRNA
caccccatccctgacgacaa

SEQ ID NO: 2875 - RNA, 20 nt, synthetic construct
  source 1..20: mol_type = other RNA
  ncRNA 1..20: ncRNA_class = sgRNA
ctgccagttagcagtcccgg

SEQ ID NO: 2876 - RNA, 20 nt, synthetic construct
  source 1..20: mol_type = other RNA
  ncRNA 1..20: ncRNA_class = sgRNA
tgccagttagcagtcccgga

SEQ ID NO: 2877 - RNA, 20 nt, synthetic construct
  source 1..20: mol_type = other RNA
  ncRNA 1..20: ncRNA_class = sgRNA
gacactactggcgacgcaca

SEQ ID NO: 2878 - RNA, 20 nt, synthetic construct
  source 1..20: mol_type = other RNA
  ncRNA 1..20: ncRNA_class = sgRNA
tgtgcgtcgccagtagtgtc

SEQ ID NO: 2879 - RNA, 20 nt, synthetic construct
  source 1..20: mol_type = other RNA
  ncRNA 1..20: ncRNA_class = sgRNA
acagattccacaaccctgaa

SEQ ID NO: 2880 - RNA, 20 nt, synthetic construct
  source 1..20: mol_type = other RNA
  ncRNA 1..20: ncRNA_class = sgRNA
caggtgacactgagccagcg

SEQ ID NO: 2881 - RNA, 20 nt, synthetic construct
  source 1..20: mol_type = other RNA
  ncRNA 1..20: ncRNA_class = sgRNA
actcatctttctacagacta

SEQ ID NO: 2882 - RNA, 20 nt, synthetic construct
  source 1..20: mol_type = other RNA
  ncRNA 1..20: ncRNA_class = sgRNA
acggtttgagctcagatatc

SEQ ID NO: 2883 - RNA, 20 nt, synthetic construct
  source 1..20: mol_type = other RNA
  ncRNA 1..20: ncRNA_class = sgRNA
agctcagatatcgggctgaa

SEQ ID NO: 2884 - RNA, 20 nt, synthetic construct
  source 1..20: mol_type = other RNA
  ncRNA 1..20: ncRNA_class = sgRNA
gtcatccacgacgcctggag

SEQ ID NO: 2885 - RNA, 20 nt, synthetic construct
  source 1..20: mol_type = other RNA
  ncRNA 1..20: ncRNA_class = sgRNA
acgacgcctggagcggcctg

SEQ ID NO: 2886 - RNA, 20 nt, synthetic construct
  source 1..20: mol_type = other RNA
  ncRNA 1..20: ncRNA_class = sgRNA
gtggagcgagtggagcccgg

SEQ ID NO: 2887 - RNA, 20 nt, synthetic construct
  source 1..20: mol_type = other RNA
  ncRNA 1..20: ncRNA_class = sgRNA
acctgtccaaggcgtgccca

SEQ ID NO: 2888 - RNA, 20 nt, synthetic construct
  source 1..20: mol_type = other RNA
  ncRNA 1..20: ncRNA_class = sgRNA
ttgagttgcattgtgaacga

SEQ ID NO: 2889 - RNA, 20 nt, synthetic construct
  source 1..20: mol_type = other RNA
  ncRNA 1..20: ncRNA_class = sgRNA
tgagttgcattgtgaacgag

SEQ ID NO: 2890 - RNA, 20 nt, synthetic construct
  source 1..20: mol_type = other RNA
  ncRNA 1..20: ncRNA_class = sgRNA
tttatcagtgatcaactcag

SEQ ID NO: 2891 - RNA, 20 nt, synthetic construct
  source 1..20: mol_type = other RNA
  ncRNA 1..20: ncRNA_class = sgRNA
ggaccaaagatgcctcaact

SEQ ID NO: 2892 - RNA, 20 nt, synthetic construct
  source 1..20: mol_type = other RNA
  ncRNA 1..20: ncRNA_class = sgRNA
agatgcctcaacttggagcc

SEQ ID NO: 2893 - RNA, 20 nt, synthetic construct
  source 1..20: mol_type = other RNA
  ncRNA 1..20: ncRNA_class = sgRNA
gtggatgctgtgtcttcagg

SEQ ID NO: 2894 - RNA, 20 nt, synthetic construct
  source 1..20: mol_type = other RNA
  ncRNA 1..20: ncRNA_class = sgRNA
gtttaggattcgctgtatga

SEQ ID NO: 2895 - RNA, 20 nt, synthetic construct
  source 1..20: mol_type = other RNA
  ncRNA 1..20: ncRNA_class = sgRNA
actggagtgaagaagcaagt

SEQ ID NO: 2896 - RNA, 20 nt, synthetic construct
  source 1..20: mol_type = other RNA
  ncRNA 1..20: ncRNA_class = sgRNA
ctgtagccttgagtatggga

SEQ ID NO: 2897 - RNA, 20 nt, synthetic construct
  source 1..20: mol_type = other RNA
  ncRNA 1..20: ncRNA_class = sgRNA
agttctgtagccttgagtat

SEQ ID NO: 2898 - RNA, 20 nt, synthetic construct
  source 1..20: mol_type = other RNA
  ncRNA 1..20: ncRNA_class = sgRNA
acagaactgtacaactcgtg

SEQ ID NO: 2899 - RNA, 20 nt, synthetic construct
  source 1..20: mol_type = other RNA
  ncRNA 1..20: ncRNA_class = sgRNA
aactgtacaactcgtgtgga

SEQ ID NO: 2900 - RNA, 20 nt, synthetic construct
  source 1..20: mol_type = other RNA
  ncRNA 1..20: ncRNA_class = sgRNA
atgaagtgactctcacaaga

SEQ ID NO: 2901 - RNA, 20 nt, synthetic construct
  source 1..20: mol_type = other RNA
  ncRNA 1..20: ncRNA_class = sgRNA
atgctttaagatccattaca

SEQ ID NO: 2902 - RNA, 20 nt, synthetic construct
  source 1..20: mol_type = other RNA
  ncRNA 1..20: ncRNA_class = sgRNA
gggtggaatggactactcca

SEQ ID NO: 2903 - RNA, 20 nt, synthetic construct
  source 1..20: mol_type = other RNA
  ncRNA 1..20: ncRNA_class = sgRNA
ggtggaatggactactccaa

SEQ ID NO: 2904 - RNA, 20 nt, synthetic construct
  source 1..20: mol_type = other RNA
  ncRNA 1..20: ncRNA_class = sgRNA
tgttgccagtctgtgataca

SEQ ID NO: 2905 - RNA, 20 nt, synthetic construct
  source 1..20: mol_type = other RNA
  ncRNA 1..20: ncRNA_class = sgRNA
aagcaccctgtatcacagac

SEQ ID NO: 2906 - RNA, 20 nt, synthetic construct
  source 1..20: mol_type = other RNA
  ncRNA 1..20: ncRNA_class = sgRNA
tcttaaataggtgcgatgca

SEQ ID NO: 2907 - RNA, 20 nt, synthetic construct
  source 1..20: mol_type = other RNA
  ncRNA 1..20: ncRNA_class = sgRNA
gtgcatcgcacctatttaag

SEQ ID NO: 2908 - RNA, 20 nt, synthetic construct
  source 1..20: mol_type = other RNA
  ncRNA 1..20: ncRNA_class = sgRNA
aggaagccctgaatccataa

SEQ ID NO: 2909 - RNA, 20 nt, synthetic construct
  source 1..20: mol_type = other RNA
  ncRNA 1..20: ncRNA_class = sgRNA
cgaacagtaggtcctttgga

SEQ ID NO: 2910 - RNA, 20 nt, synthetic construct
  source 1..20: mol_type = other RNA
  ncRNA 1..20: ncRNA_class = sgRNA
cttccaaaggacctactgtt

SEQ ID NO: 2911 - RNA, 20 nt, synthetic construct
  source 1..20: mol_type = other RNA
  ncRNA 1..20: ncRNA_class = sgRNA
ggacaatgtatattctgtgt

SEQ ID NO: 2912 - RNA, 20 nt, synthetic construct
  source 1..20: mol_type = other RNA
  ncRNA 1..20: ncRNA_class = sgRNA
aggacaatgtatattctgtg

SEQ ID NO: 2913 - RNA, 20 nt, synthetic construct
  source 1..20: mol_type = other RNA
  ncRNA 1..20: ncRNA_class = sgRNA
caatgtgtcactagtcaaag

SEQ ID NO: 2914 - RNA, 20 nt, synthetic construct
  source 1..20: mol_type = other RNA
  ncRNA 1..20: ncRNA_class = sgRNA
gactagtgacacattgtaca

SEQ ID NO: 2915 - RNA, 20 nt, synthetic construct
  source 1..20: mol_type = other RNA
  ncRNA 1..20: ncRNA_class = sgRNA
taagcaaacaggcacgacta

SEQ ID NO: 2916 - RNA, 20 nt, synthetic construct
  source 1..20: mol_type = other RNA
  ncRNA 1..20: ncRNA_class = sgRNA
caaagagtcatattgcccag

SEQ ID NO: 2917 - RNA, 20 nt, synthetic construct
  source 1..20: mol_type = other RNA
  ncRNA 1..20: ncRNA_class = sgRNA
cttacccttggaggagtgtg

SEQ ID NO: 2918 - RNA, 20 nt, synthetic construct
  source 1..20: mol_type = other RNA
  ncRNA 1..20: ncRNA_class = sgRNA
tgtgtaccacggtagaatac

SEQ ID NO: 2919 - RNA, 20 nt, synthetic construct
  source 1..20: mol_type = other RNA
  ncRNA 1..20: ncRNA_class = sgRNA
cactgtccagtattctaccg

SEQ ID NO: 2920 - RNA, 20 nt, synthetic construct
  source 1..20: mol_type = other RNA
  ncRNA 1..20: ncRNA_class = sgRNA
tctgtagccactgtgtacca

SEQ ID NO: 2921 - RNA, 20 nt, synthetic construct
  source 1..20: mol_type = other RNA
  ncRNA 1..20: ncRNA_class = sgRNA
tattctaccgtggtacacag

SEQ ID NO: 2922 - RNA, 20 nt, synthetic construct
  source 1..20: mol_type = other RNA
  ncRNA 1..20: ncRNA_class = sgRNA
agacttggactgacggaact

SEQ ID NO: 2923 - RNA, 20 nt, synthetic construct
  source 1..20: mol_type = other RNA
  ncRNA 1..20: ncRNA_class = sgRNA
atttgaaacagttggcatgg

SEQ ID NO: 2924 - RNA, 20 nt, synthetic construct
  source 1..20: mol_type = other RNA
  ncRNA 1..20: ncRNA_class = sgRNA
ccgccttgccgtacagtctg

SEQ ID NO: 2925 - RNA, 20 nt, synthetic construct
  source 1..20: mol_type = other RNA
  ncRNA 1..20: ncRNA_class = sgRNA
gttacttaccacagactgta

SEQ ID NO: 2926 - RNA, 20 nt, synthetic construct
  source 1..20: mol_type = other RNA
  ncRNA 1..20: ncRNA_class = sgRNA
ttaccacagactgtacggca

SEQ ID NO: 2927 - RNA, 20 nt, synthetic construct
  source 1..20: mol_type = other RNA
  ncRNA 1..20: ncRNA_class = sgRNA
ccacagactgtacggcaagg

SEQ ID NO: 2928 - RNA, 20 nt, synthetic construct
  source 1..20: mol_type = other RNA
  ncRNA 1..20: ncRNA_class = sgRNA
ttggtgggaatatacccctc

SEQ ID NO: 2929 - RNA, 20 nt, synthetic construct
  source 1..20: mol_type = other RNA
  ncRNA 1..20: ncRNA_class = sgRNA
tggtgggaatatacccctca

SEQ ID NO: 2930 - RNA, 20 nt, synthetic construct
  source 1..20: mol_type = other RNA
  ncRNA 1..20: ncRNA_class = sgRNA
ggtgggaatatacccctcag

SEQ ID NO: 2931 - RNA, 20 nt, synthetic construct
  source 1..20: mol_type = other RNA
  ncRNA 1..20: ncRNA_class = sgRNA
ccagtccaataacccctgag

SEQ ID NO: 2932 - RNA, 20 nt, synthetic construct
  source 1..20: mol_type = other RNA
  ncRNA 1..20: ncRNA_class = sgRNA
gaccagtccaataacccctg

SEQ ID NO: 2933 - RNA, 20 nt, synthetic construct
  source 1..20: mol_type = other RNA
  ncRNA 1..20: ncRNA_class = sgRNA
tggactggtccctcacctag

SEQ ID NO: 2934 - RNA, 20 nt, synthetic construct
  source 1..20: mol_type = other RNA
  ncRNA 1..20: ncRNA_class = sgRNA
tgctgtaccaagtgccacaa

SEQ ID NO: 2935 - RNA, 20 nt, synthetic construct
  source 1..20: mol_type = other RNA
  ncRNA 1..20: ncRNA_class = sgRNA
tggacagtcattgtacaagt

SEQ ID NO: 2936 - RNA, 20 nt, synthetic construct
  source 1..20: mol_type = other RNA
  ncRNA 1..20: ncRNA_class = sgRNA
acaatgactgtccaggcccg

SEQ ID NO: 2937 - RNA, 20 nt, synthetic construct
  source 1..20: mol_type = other RNA
  ncRNA 1..20: ncRNA_class = sgRNA
ggggcaggatacggactgca

SEQ ID NO: 2938 - RNA, 20 nt, synthetic construct
  source 1..20: mol_type = other RNA
  ncRNA 1..20: ncRNA_class = sgRNA
cagctgctccaaatgccgaa

SEQ ID NO: 2939 - RNA, 20 nt, synthetic construct
  source 1..20: mol_type = other RNA
  ncRNA 1..20: ncRNA_class = sgRNA
ggagatctcttcttgcacag

SEQ ID NO: 2940 - RNA, 20 nt, synthetic construct
  source 1..20: mol_type = other RNA
  ncRNA 1..20: ncRNA_class = sgRNA
gtggaccgggacaccgtgtg

SEQ ID NO: 2941 - RNA, 20 nt, synthetic construct
  source 1..20: mol_type = other RNA
  ncRNA 1..20: ncRNA_class = sgRNA
agaggtgcacggtcccattg

SEQ ID NO: 2942 - RNA, 20 nt, synthetic construct
  source 1..20: mol_type = other RNA
  ncRNA 1..20: ncRNA_class = sgRNA
accgtgtgcacctgccatgc

SEQ ID NO: 2943 - RNA, 20 nt, synthetic construct
  source 1..20: mol_type = other RNA
  ncRNA 1..20: ncRNA_class = sgRNA
gaccaggggcaacagcactg

SEQ ID NO: 2944 - RNA, 20 nt, synthetic construct
  source 1..20: mol_type = other RNA
  ncRNA 1..20: ncRNA_class = sgRNA
gtttaatgtatcgctaccaa

SEQ ID NO: 2945 - RNA, 20 nt, synthetic construct
  source 1..20: mol_type = other RNA
  ncRNA 1..20: ncRNA_class = sgRNA
taatgtatcgctaccaacgg

SEQ ID NO: 2946 - RNA, 20 nt, synthetic construct
  source 1..20: mol_type = other RNA
  ncRNA 1..20: ncRNA_class = sgRNA
agagcttggacttccaccgt

SEQ ID NO: 2947 - RNA, 20 nt, synthetic construct
  source 1..20: mol_type = other RNA
  ncRNA 1..20: ncRNA_class = sgRNA
aggaactactactaagcccc

SEQ ID NO: 2948 - RNA, 20 nt, synthetic construct
  source 1..20: mol_type = other RNA
  ncRNA 1..20: ncRNA_class = sgRNA
aaagttgggacagtcaccgg

SEQ ID NO: 2949 - RNA, 20 nt, synthetic construct
  source 1..20: mol_type = other RNA
  ncRNA 1..20: ncRNA_class = sgRNA
caaagttgggacagtcaccg

SEQ ID NO: 2950 - RNA, 20 nt, synthetic construct
  source 1..20: mol_type = other RNA
  ncRNA 1..20: ncRNA_class = sgRNA
ctgcggggagccgcaaagtt

SEQ ID NO: 2951 - RNA, 20 nt, synthetic construct
  source 1..20: mol_type = other RNA
  ncRNA 1..20: ncRNA_class = sgRNA
cggtgactgtcccaactttg

SEQ ID NO: 2952 - RNA, 20 nt, synthetic construct
  source 1..20: mol_type = other RNA
  ncRNA 1..20: ncRNA_class = sgRNA
ggtggtgccacctctctgcg

SEQ ID NO: 2953 - RNA, 20 nt, synthetic construct
  source 1..20: mol_type = other RNA
  ncRNA 1..20: ncRNA_class = sgRNA
ctttgcggctccccgcagag

SEQ ID NO: 2954 - RNA, 20 nt, synthetic construct
  source 1..20: mol_type = other RNA
  ncRNA 1..20: ncRNA_class = sgRNA
gggtcagccccctgataggg

SEQ ID NO: 2955 - RNA, 20 nt, synthetic construct
  source 1..20: mol_type = other RNA
  ncRNA 1..20: ncRNA_class = sgRNA
aggtggcaccaccctatcag

SEQ ID NO: 2956 - RNA, 20 nt, synthetic construct
  source 1..20: mol_type = other RNA
  ncRNA 1..20: ncRNA_class = sgRNA
ggtggcaccaccctatcagg

SEQ ID NO: 2957 - RNA, 20 nt, synthetic construct
  source 1..20: mol_type = other RNA
  ncRNA 1..20: ncRNA_class = sgRNA
ccacggcgtacagcgtcgcg

SEQ ID NO: 2958 - RNA, 20 nt, synthetic construct
  source 1..20: mol_type = other RNA
  ncRNA 1..20: ncRNA_class = sgRNA
cgcgacgctgtacgccgtgg

SEQ ID NO: 2959 - RNA, 20 nt, synthetic construct
  source 1..20: mol_type = other RNA
  ncRNA 1..20: ncRNA_class = sgRNA
cgggggcacgttctccacca

SEQ ID NO: 2960 - RNA, 20 nt, synthetic construct
  source 1..20: mol_type = other RNA
  ncRNA 1..20: ncRNA_class = sgRNA
aattccttccagcgcaacgg

SEQ ID NO: 2961 - RNA, 20 nt, synthetic construct
  source 1..20: mol_type = other RNA
  ncRNA 1..20: ncRNA_class = sgRNA
gaattccttccagcgcaacg

SEQ ID NO: 2962 - RNA, 20 nt, synthetic construct
  source 1..20: mol_type = other RNA
  ncRNA 1..20: ncRNA_class = sgRNA
acgaattccttccagcgcaa

SEQ ID NO: 2963 - RNA, 20 nt, synthetic construct
  source 1..20: mol_type = other RNA
  ncRNA 1..20: ncRNA_class = sgRNA
cgtgcccccgttgcgctgga

SEQ ID NO: 2964 - RNA, 20 nt, synthetic construct
  source 1..20: mol_type = other RNA
  ncRNA 1..20: ncRNA_class = sgRNA
tgcgctggaaggaattcgtg

SEQ ID NO: 2965 - RNA, 20 nt, synthetic construct
  source 1..20: mol_type = other RNA
  ncRNA 1..20: ncRNA_class = sgRNA
tgagcgaccacgagatcgat

SEQ ID NO: 2966 - RNA, 20 nt, synthetic construct
  source 1..20: mol_type = other RNA
  ncRNA 1..20: ncRNA_class = sgRNA
aatacagcatgctggcgacc

SEQ ID NO: 2967 - RNA, 20 nt, synthetic construct
  source 1..20: mol_type = other RNA
  ncRNA 1..20: ncRNA_class = sgRNA
acagcatgctggcgacctgg

SEQ ID NO: 2968 - RNA, 20 nt, synthetic construct
  source 1..20: mol_type = other RNA
  ncRNA 1..20: ncRNA_class = sgRNA
tccagcgtggcctcgcgccg

SEQ ID NO: 2969 - RNA, 20 nt, synthetic construct
  source 1..20: mol_type = other RNA
  ncRNA 1..20: ncRNA_class = sgRNA
ctccagtccgacggccagcg

SEQ ID NO: 2970 - RNA, 20 nt, synthetic construct
  source 1..20: mol_type = other RNA
  ncRNA 1..20: ncRNA_class = sgRNA
ctcccgggctccggggcgta

SEQ ID NO: 2971 - RNA, 20 nt, synthetic construct
  source 1..20: mol_type = other RNA
  ncRNA 1..20: ncRNA_class = sgRNA
ggcatttacaccctacgccc

SEQ ID NO: 2972 - RNA, 20 nt, synthetic construct
  source 1..20: mol_type = other RNA
  ncRNA 1..20: ncRNA_class = sgRNA
gcatgtgctcccgggctccg

SEQ ID NO: 2973 - RNA, 20 nt, synthetic construct
  source 1..20: mol_type = other RNA
  ncRNA 1..20: ncRNA_class = sgRNA
ctgagccggcatgtgctccc

SEQ ID NO: 2974 - RNA, 20 nt, synthetic construct
  source 1..20: mol_type = other RNA
  ncRNA 1..20: ncRNA_class = sgRNA
gtgctgcagcaaatgctcgc

SEQ ID NO: 2975 - RNA, 20 nt, synthetic construct
  source 1..20: mol_type = other RNA
  ncRNA 1..20: ncRNA_class = sgRNA
ggagtcacacacggtgtccg

SEQ ID NO: 2976 - RNA, 20 nt, synthetic construct
  source 1..20: mol_type = other RNA
  ncRNA 1..20: ncRNA_class = sgRNA
gtcctcacaggagtcacaca

SEQ ID NO: 2977 - RNA, 20 nt, synthetic construct
  source 1..20: mol_type = other RNA
  ncRNA 1..20: ncRNA_class = sgRNA
caccgtgtgtgactcctgtg

SEQ ID NO: 2978 - RNA, 20 nt, synthetic construct
  source 1..20: mol_type = other RNA
  ncRNA 1..20: ncRNA_class = sgRNA
ggtgtatgtgctgtcctcac

SEQ ID NO: 2979 - RNA, 20 nt, synthetic construct
  source 1..20: mol_type = other RNA
  ncRNA 1..20: ncRNA_class = sgRNA
gggaacccagttccagagct

SEQ ID NO: 2980 - RNA, 20 nt, synthetic construct
  source 1..20: mol_type = other RNA
  ncRNA 1..20: ncRNA_class = sgRNA
ggaaactcaagcctgcactc

SEQ ID NO: 2981 - RNA, 20 nt, synthetic construct
  source 1..20: mol_type = other RNA
  ncRNA 1..20: ncRNA_class = sgRNA
gcggttctgttcccgagtgc

SEQ ID NO: 2982 - RNA, 20 nt, synthetic construct
  source 1..20: mol_type = other RNA
  ncRNA 1..20: ncRNA_class = sgRNA
gtactgcgcgctgagcaagc

SEQ ID NO: 2983 - RNA, 20 nt, synthetic construct
  source 1..20: mol_type = other RNA
  ncRNA 1..20: ncRNA_class = sgRNA
tgcgcgctgagcaagcagga

SEQ ID NO: 2984 - RNA, 20 nt, synthetic construct
  source 1..20: mol_type = other RNA
  ncRNA 1..20: ncRNA_class = sgRNA
cccgggcggcacttgcgcag

SEQ ID NO: 2985 - RNA, 20 nt, synthetic construct
  source 1..20: mol_type = other RNA
  ncRNA 1..20: ncRNA_class = sgRNA
ccgctgcgcaagtgccgccc

SEQ ID NO: 2986 - RNA, 20 nt, synthetic construct
  source 1..20: mol_type = other RNA
  ncRNA 1..20: ncRNA_class = sgRNA
tggccacgccgaagcccggg

SEQ ID NO: 2987 - RNA, 20 nt, synthetic construct
  source 1..20: mol_type = other RNA
  ncRNA 1..20: ncRNA_class = sgRNA
aggaactgaaacatcagacg

SEQ ID NO: 2988 - RNA, 20 nt, synthetic construct
  source 1..20: mol_type = other RNA
  ncRNA 1..20: ncRNA_class = sgRNA
gagaacgtccccggggcaca

SEQ ID NO: 2989 - RNA, 20 nt, synthetic construct
  source 1..20: mol_type = other RNA
  ncRNA 1..20: ncRNA_class = sgRNA
tgtgcaagccctgtgccccg

SEQ ID NO: 2990 - RNA, 20 nt, synthetic construct
  source 1..20: mol_type = other RNA
  ncRNA 1..20: ncRNA_class = sgRNA
cgtgttggagaacgtccccg

SEQ ID NO: 2991 - RNA, 20 nt, synthetic construct
  source 1..20: mol_type = other RNA
  ncRNA 1..20: ncRNA_class = sgRNA
gtcgtgttggagaacgtccc

SEQ ID NO: 2992 - RNA, 20 nt, synthetic construct
  source 1..20: mol_type = other RNA
  ncRNA 1..20: ncRNA_class = sgRNA
ctccaacacgacttcatcca

SEQ ID NO: 2993 - RNA, 20 nt, synthetic construct
  source 1..20: mol_type = other RNA
  ncRNA 1..20: ncRNA_class = sgRNA
gtggggcctgcaaatatccg

SEQ ID NO: 2994 - RNA, 20 nt, synthetic construct
  source 1..20: mol_type = other RNA
  ncRNA 1..20: ncRNA_class = sgRNA
gtaacgtggtggccatccct

SEQ ID NO: 2995 - RNA, 20 nt, synthetic construct
  source 1..20: mol_type = other RNA
  ncRNA 1..20: ncRNA_class = sgRNA
ctggggccatactccgggtg

SEQ ID NO: 2996 - RNA, 20 nt, synthetic construct
  source 1..20: mol_type = other RNA
  ncRNA 1..20: ncRNA_class = sgRNA
cctggggccatactccgggt

SEQ ID NO: 2997 - RNA, 20 nt, synthetic construct
  source 1..20: mol_type = other RNA
  ncRNA 1..20: ncRNA_class = sgRNA
ccacccggagtatggcccca

SEQ ID NO: 2998 - RNA, 20 nt, synthetic construct
  source 1..20: mol_type = other RNA
  ncRNA 1..20: ncRNA_class = sgRNA
cacccggagtatggccccag

SEQ ID NO: 2999 - RNA, 20 nt, synthetic construct
  source 1..20: mol_type = other RNA
  ncRNA 1..20: ncRNA_class = sgRNA
tgttgggatcgtgtggacac

SEQ ID NO: 3000 - RNA, 20 nt, synthetic construct
  source 1..20: mol_type = other RNA
  ncRNA 1..20: ncRNA_class = sgRNA
ctgcgtgtgttgggatcgtg

SEQ ID NO: 3001 - RNA, 20 nt, synthetic construct
  source 1..20: mol_type = other RNA
  ncRNA 1..20: ncRNA_class = sgRNA
tggagttggctgcgtgtgtt

SEQ ID NO: 3002 - RNA, 20 nt, synthetic construct
  source 1..20: mol_type = other RNA
  ncRNA 1..20: ncRNA_class = sgRNA
gaactgtgtcatcatgaccc

SEQ ID NO: 3003 - RNA, 20 nt, synthetic construct
  source 1..20: mol_type = other RNA
  ncRNA 1..20: ncRNA_class = sgRNA
ttgcctgccgataaggcccg

SEQ ID NO: 3004 - RNA, 20 nt, synthetic construct
  source 1..20: mol_type = other RNA
  ncRNA 1..20: ncRNA_class = sgRNA
cgataaggcccggggtacac

SEQ ID NO: 3005 - RNA, 20 nt, synthetic construct
  source 1..20: mol_type = other RNA
  ncRNA 1..20: ncRNA_class = sgRNA
gataaggcccggggtacaca

SEQ ID NO: 3006 - RNA, 20 nt, synthetic construct
  source 1..20: mol_type = other RNA
  ncRNA 1..20: ncRNA_class = sgRNA
gcctgtggctggttccgagt

SEQ ID NO: 3007 - RNA, 20 nt, synthetic construct
  source 1..20: mol_type = other RNA
  ncRNA 1..20: ncRNA_class = sgRNA
tgcctgtggctggttccgag

SEQ ID NO: 3008 - RNA, 20 nt, synthetic construct
  source 1..20: mol_type = other RNA
  ncRNA 1..20: ncRNA_class = sgRNA
gatgcaggtgacattgacct

SEQ ID NO: 3009 - RNA, 20 nt, synthetic construct
  source 1..20: mol_type = other RNA
  ncRNA 1..20: ncRNA_class = sgRNA
gctacagacgttcacgatgc

SEQ ID NO: 3010 - RNA, 20 nt, synthetic construct
  source 1..20: mol_type = other RNA
  ncRNA 1..20: ncRNA_class = sgRNA
ctcccaagccagctccacaa

SEQ ID NO: 3011 - RNA, 20 nt, synthetic construct
  source 1..20: mol_type = other RNA
  ncRNA 1..20: ncRNA_class = sgRNA
cgtccttcggggactccgag

SEQ ID NO: 3012 - RNA, 20 nt, synthetic construct
  source 1..20: mol_type = other RNA
  ncRNA 1..20: ncRNA_class = sgRNA
ggggacctgctcgtccttcg

SEQ ID NO: 3013 - RNA, 20 nt, synthetic construct
  source 1..20: mol_type = other RNA
  ncRNA 1..20: ncRNA_class = sgRNA
gcaggtccccttctccaagg

SEQ ID NO: 3014 - RNA, 20 nt, synthetic construct
  source 1..20: mol_type = other RNA
  ncRNA 1..20: ncRNA_class = sgRNA
tggttctccgacgcatatgg

SEQ ID NO: 3015 - RNA, 20 nt, synthetic construct
  source 1..20: mol_type = other RNA
  ncRNA 1..20: ncRNA_class = sgRNA
gtcggagaaccagacctgca

SEQ ID NO: 3016 - RNA, 20 nt, synthetic construct
  source 1..20: mol_type = other RNA
  ncRNA 1..20: ncRNA_class = sgRNA
ggagcagcagatgcggtgct

SEQ ID NO: 3017 - RNA, 20 nt, synthetic construct
  source 1..20: mol_type = other RNA
  ncRNA 1..20: ncRNA_class = sgRNA
gctacatttagctgagacat

SEQ ID NO: 3018 - RNA, 20 nt, synthetic construct
  source 1..20: mol_type = other RNA
  ncRNA 1..20: ncRNA_class = sgRNA
atgtggcacaaactgtgtcc

SEQ ID NO: 3019 - RNA, 20 nt, synthetic construct
  source 1..20: mol_type = other RNA
  ncRNA 1..20: ncRNA_class = sgRNA
ttgccccctgcacaagcaaa

SEQ ID NO: 3020 - RNA, 20 nt, synthetic construct
  source 1..20: mol_type = other RNA
  ncRNA 1..20: ncRNA_class = sgRNA
gctcgcagtgtgtacactcg

SEQ ID NO: 3021 - RNA, 20 nt, synthetic construct
  source 1..20: mol_type = other RNA
  ncRNA 1..20: ncRNA_class = sgRNA
tggaagtgcccggccttgca

SEQ ID NO: 3022 - RNA, 20 nt, synthetic construct
  source 1..20: mol_type = other RNA
  ncRNA 1..20: ncRNA_class = sgRNA
gagctgcctccaccagacct

SEQ ID NO: 3023 - RNA, 20 nt, synthetic construct
  source 1..20: mol_type = other RNA
  ncRNA 1..20: ncRNA_class = sgRNA
gtgtgagaaccaaggtctgg

SEQ ID NO: 3024 - RNA, 20 nt, synthetic construct
  source 1..20: mol_type = other RNA
  ncRNA 1..20: ncRNA_class = sgRNA
caatcctgtagctggaagct

SEQ ID NO: 3025 - RNA, 20 nt, synthetic construct
  source 1..20: mol_type = other RNA
  ncRNA 1..20: ncRNA_class = sgRNA
aagtatggatgggccttcgg

SEQ ID NO: 3026 - RNA, 20 nt, synthetic construct
  source 1..20: mol_type = other RNA
  ncRNA 1..20: ncRNA_class = sgRNA
caagtcagggaagtatggat

SEQ ID NO: 3027 - RNA, 20 nt, synthetic construct
  source 1..20: mol_type = other RNA
  ncRNA 1..20: ncRNA_class = sgRNA
gcagtggctgtaccaagtca

SEQ ID NO: 3028 - RNA, 20 nt, synthetic construct
  source 1..20: mol_type = other RNA
  ncRNA 1..20: ncRNA_class = sgRNA
cctccaaaactggggctgcg

SEQ ID NO: 3029 - RNA, 20 nt, synthetic construct
  source 1..20: mol_type = other RNA
  ncRNA 1..20: ncRNA_class = sgRNA
gagtcctctggacctgacca

SEQ ID NO: 3030 - RNA, 20 nt, synthetic construct
  source 1..20: mol_type = other RNA
  ncRNA 1..20: ncRNA_class = sgRNA
accaatggcattcatgtcac

SEQ ID NO: 3031 - RNA, 20 nt, synthetic construct
  source 1..20: mol_type = other RNA
  ncRNA 1..20: ncRNA_class = sgRNA
agtgatagtcatagacccgc

SEQ ID NO: 3032 - RNA, 20 nt, synthetic construct
  source 1..20: mol_type = other RNA
  ncRNA 1..20: ncRNA_class = sgRNA
tctacaatggaccagtactg

SEQ ID NO: 3033 - RNA, 20 nt, synthetic construct
  source 1..20: mol_type = other RNA
  ncRNA 1..20: ncRNA_class = sgRNA
aatggggtatggaggttcgg

SEQ ID NO: 3034 - RNA, 20 nt, synthetic construct
  source 1..20: mol_type = other RNA
  ncRNA 1..20: ncRNA_class = sgRNA
gaatggggtatggaggttcg

SEQ ID NO: 3035 - RNA, 20 nt, synthetic construct
  source 1..20: mol_type = other RNA
  ncRNA 1..20: ncRNA_class = sgRNA
gcagagccgcacacggcccg

SEQ ID NO: 3036 - RNA, 20 nt, synthetic construct
  source 1..20: mol_type = other RNA
  ncRNA 1..20: ncRNA_class = sgRNA
gctgggccgcgggccgtgtg

SEQ ID NO: 3037 - RNA, 20 nt, synthetic construct
  source 1..20: mol_type = other RNA
  ncRNA 1..20: ncRNA_class = sgRNA
aggaggagcagagccgcaca

SEQ ID NO: 3038 - RNA, 20 nt, synthetic construct
  source 1..20: mol_type = other RNA
  ncRNA 1..20: ncRNA_class = sgRNA
gacacagtggagccccgtca

SEQ ID NO: 3039 - RNA, 20 nt, synthetic construct
  source 1..20: mol_type = other RNA
  ncRNA 1..20: ncRNA_class = sgRNA
ggtaggtgtccccgacacag

SEQ ID NO: 3040 - RNA, 20 nt, synthetic construct
  source 1..20: mol_type = other RNA
  ncRNA 1..20: ncRNA_class = sgRNA
gacggggctccactgtgtcg

SEQ ID NO: 3041 - RNA, 20 nt, synthetic construct
  source 1..20: mol_type = other RNA
  ncRNA 1..20: ncRNA_class = sgRNA
ctgcagccgctcccagaaca

SEQ ID NO: 3042 - RNA, 20 nt, synthetic construct
  source 1..20: mol_type = other RNA
  ncRNA 1..20: ncRNA_class = sgRNA
aacacggtgtgccgtccgtg

SEQ ID NO: 3043 - RNA, 20 nt, synthetic construct
  source 1..20: mol_type = other RNA
  ncRNA 1..20: ncRNA_class = sgRNA
agaagcccggcccgcacgga

SEQ ID NO: 3044 - RNA, 20 nt, synthetic construct
  source 1..20: mol_type = other RNA
  ncRNA 1..20: ncRNA_class = sgRNA
acacggtgtgccgtccgtgc

SEQ ID NO: 3045 - RNA, 20 nt, synthetic construct
  source 1..20: mol_type = other RNA
  ncRNA 1..20: ncRNA_class = sgRNA
ttgtagaagcccggcccgca

SEQ ID NO: 3046 - RNA, 20 nt, synthetic construct
  source 1..20: mol_type = other RNA
  ncRNA 1..20: ncRNA_class = sgRNA
ctgaggttacaccacgtgca

SEQ ID NO: 3047 - RNA, 20 nt, synthetic construct
  source 1..20: mol_type = other RNA
  ncRNA 1..20: ncRNA_class = sgRNA
tgagcggaagcagctgtgca

SEQ ID NO: 3048 - RNA, 20 nt, synthetic construct
  source 1..20: mol_type = other RNA
  ncRNA 1..20: ncRNA_class = sgRNA
gcggcagactgtgtcctgtg

SEQ ID NO: 3049 - RNA, 20 nt, synthetic construct
  source 1..20: mol_type = other RNA
  ncRNA 1..20: ncRNA_class = sgRNA
ccaggcttgtagctgtccag

SEQ ID NO: 3050 - RNA, 20 nt, synthetic construct
  source 1..20: mol_type = other RNA
  ncRNA 1..20: ncRNA_class = sgRNA
tccaggcttgtagctgtcca

SEQ ID NO: 3051 - RNA, 20 nt, synthetic construct
  source 1..20: mol_type = other RNA
  ncRNA 1..20: ncRNA_class = sgRNA
ctggggagaagtgccctgga

SEQ ID NO: 3052 - RNA, 20 nt, synthetic construct
  source 1..20: mol_type = other RNA
  ncRNA 1..20: ncRNA_class = sgRNA
gcaggcctggttgtcgcctg

SEQ ID NO: 3053 - RNA, 20 nt, synthetic construct
  source 1..20: mol_type = other RNA
  ncRNA 1..20: ncRNA_class = sgRNA
gctattgctggccggctgca

SEQ ID NO: 3054 - RNA, 20 nt, synthetic construct
  source 1..20: mol_type = other RNA
  ncRNA 1..20: ncRNA_class = sgRNA
gcgtccgagctattgctggc

SEQ ID NO: 3055 - RNA, 20 nt, synthetic construct
  source 1..20: mol_type = other RNA
  ncRNA 1..20: ncRNA_class = sgRNA
tagctcggacgcaatctgtg

SEQ ID NO: 3056 - RNA, 20 nt, synthetic construct
  source 1..20: mol_type = other RNA
  ncRNA 1..20: ncRNA_class = sgRNA
ggggacctccacgggccggg

SEQ ID NO: 3057 - RNA, 20 nt, synthetic construct
  source 1..20: mol_type = other RNA
  ncRNA 1..20: ncRNA_class = sgRNA
cggcccgtggaggtccccgg

SEQ ID NO: 3058 - RNA, 20 nt, synthetic construct
  source 1..20: mol_type = other RNA
  ncRNA 1..20: ncRNA_class = sgRNA
ccaggatggcggcaaccgca

SEQ ID NO: 3059 - RNA, 20 nt, synthetic construct
  source 1..20: mol_type = other RNA
  ncRNA 1..20: ncRNA_class = sgRNA
gtccctccggagcaggtaca

SEQ ID NO: 3060 - RNA, 20 nt, synthetic construct
  source 1..20: mol_type = other RNA
  ncRNA 1..20: ncRNA_class = sgRNA
ggcctgctcctcttggatgg

SEQ ID NO: 3061 - RNA, 20 nt, synthetic construct
  source 1..20: mol_type = other RNA
  ncRNA 1..20: ncRNA_class = sgRNA
tttccggacccccatccaag

SEQ ID NO: 3062 - RNA, 20 nt, synthetic construct
  source 1..20: mol_type = other RNA
  ncRNA 1..20: ncRNA_class = sgRNA
tgcttctcactggtacatgg

SEQ ID NO: 3063 - RNA, 20 nt, synthetic construct
  source 1..20: mol_type = other RNA
  ncRNA 1..20: ncRNA_class = sgRNA
taatgcttctcactggtaca

SEQ ID NO: 3064 - RNA, 20 nt, synthetic construct
  source 1..20: mol_type = other RNA
  ncRNA 1..20: ncRNA_class = sgRNA
gagaagcattatgagcatct

SEQ ID NO: 3065 - RNA, 20 nt, synthetic construct
  source 1..20: mol_type = other RNA
  ncRNA 1..20: ncRNA_class = sgRNA
agcattatgagcatctggga

SEQ ID NO: 3066 - RNA, 20 nt, synthetic construct
  source 1..20: mol_type = other RNA
  ncRNA 1..20: ncRNA_class = sgRNA
gggcagacatacactgtcag

SEQ ID NO: 3067 - RNA, 20 nt, synthetic construct
  source 1..20: mol_type = other RNA
  ncRNA 1..20: ncRNA_class = sgRNA
gacagtgtatgtctgccctg

SEQ ID NO: 3068 - RNA, 20 nt, synthetic construct
  source 1..20: mol_type = other RNA
  ncRNA 1..20: ncRNA_class = sgRNA
aagtattcatccgggccaca

SEQ ID NO: 3069 - RNA, 20 nt, synthetic construct
  source 1..20: mol_type = other RNA
  ncRNA 1..20: ncRNA_class = sgRNA
cgtgcacgcgcagcgccggg

SEQ ID NO: 3070 - RNA, 20 nt, synthetic construct
  source 1..20: mol_type = other RNA
  ncRNA 1..20: ncRNA_class = sgRNA
cccccggcgctgcgcgtgca

SEQ ID NO: 3071 - RNA, 20 nt, synthetic construct
  source 1..20: mol_type = other RNA
  ncRNA 1..20: ncRNA_class = sgRNA
gcgcgcactcggtgttgcgg

SEQ ID NO: 3072 - RNA, 20 nt, synthetic construct
  source 1..20: mol_type = other RNA
  ncRNA 1..20: ncRNA_class = sgRNA
catcagagaagtagcctgca

SEQ ID NO: 3073 - RNA, 20 nt, synthetic construct
  source 1..20: mol_type = other RNA
  ncRNA 1..20: ncRNA_class = sgRNA
ccagggtctgcatttgtccg

SEQ ID NO: 3074 - RNA, 20 nt, synthetic construct
  source 1..20: mol_type = other RNA
  ncRNA 1..20: ncRNA_class = sgRNA
tgggacagagaaatccgatg

SEQ ID NO: 3075 - RNA, 20 nt, synthetic construct
  source 1..20: mol_type = other RNA
  ncRNA 1..20: ncRNA_class = sgRNA
agaagaactgcaaaccgcat

SEQ ID NO: 3076 - RNA, 20 nt, synthetic construct
  source 1..20: mol_type = other RNA
  ncRNA 1..20: ncRNA_class = sgRNA
aaaccgggcaagtaaacatg

SEQ ID NO: 3077 - RNA, 20 nt, synthetic construct
  source 1..20: mol_type = other RNA
  ncRNA 1..20: ncRNA_class = sgRNA
taaaccgggcaagtaaacat

SEQ ID NO: 3078 - RNA, 20 nt, synthetic construct
  source 1..20: mol_type = other RNA
  ncRNA 1..20: ncRNA_class = sgRNA
tttgtggcactggatcaatg

SEQ ID NO: 3079 - RNA, 20 nt, synthetic construct
  source 1..20: mol_type = other RNA
  ncRNA 1..20: ncRNA_class = sgRNA
cactggatcaatgaggcttg

SEQ ID NO: 3080 - RNA, 20 nt, synthetic construct
  source 1..20: mol_type = other RNA
  ncRNA 1..20: ncRNA_class = sgRNA
tggccgcctaagtggagata

SEQ ID NO: 3081 - RNA, 20 nt, synthetic construct
  source 1..20: mol_type = other RNA
  ncRNA 1..20: ncRNA_class = sgRNA
actgacacaactgtcacctg

SEQ ID NO: 3082 - RNA, 20 nt, synthetic construct
  source 1..20: mol_type = other RNA
  ncRNA 1..20: ncRNA_class = sgRNA
cagttgtgtcagtacacaca

SEQ ID NO: 3083 - RNA, 20 nt, synthetic construct
  source 1..20: mol_type = other RNA
  ncRNA 1..20: ncRNA_class = sgRNA
agtacacacacggcaaactt

SEQ ID NO: 3084 - RNA, 20 nt, synthetic construct
  source 1..20: mol_type = other RNA
  ncRNA 1..20: ncRNA_class = sgRNA
acggcaaactttggtcagca

SEQ ID NO: 3085 - RNA, 20 nt, synthetic construct
  source 1..20: mol_type = other RNA
  ncRNA 1..20: ncRNA_class = sgRNA
tgtcagggcacatgtgtagg

SEQ ID NO: 3086 - RNA, 20 nt, synthetic construct
  source 1..20: mol_type = other RNA
  ncRNA 1..20: ncRNA_class = sgRNA
ggaggtggtccctacgcaca

SEQ ID NO: 3087 - RNA, 20 nt, synthetic construct
  source 1..20: mol_type = other RNA
  ncRNA 1..20: ncRNA_class = sgRNA
acgcacaaggcgaagatgcc

SEQ ID NO: 3088 - RNA, 20 nt, synthetic construct
  source 1..20: mol_type = other RNA
  ncRNA 1..20: ncRNA_class = sgRNA
ggtcagcaagaccgagatag

SEQ ID NO: 3089 - RNA, 20 nt, synthetic construct
  source 1..20: mol_type = other RNA
  ncRNA 1..20: ncRNA_class = sgRNA
gtttaagccagtgcttcacg

SEQ ID NO: 3090 - RNA, 20 nt, synthetic construct
  source 1..20: mol_type = other RNA
  ncRNA 1..20: ncRNA_class = sgRNA
gtccaatcagtcctgcacag

SEQ ID NO: 3091 - RNA, 20 nt, synthetic construct
  source 1..20: mol_type = other RNA
  ncRNA 1..20: ncRNA_class = sgRNA
ttgcaaaaagaggtggacag

SEQ ID NO: 3092 - RNA, 20 nt, synthetic construct
  source 1..20: mol_type = other RNA
  ncRNA 1..20: ncRNA_class = sgRNA
cagtggccattgcccgcact

SEQ ID NO: 3093 - RNA, 20 nt, synthetic construct
  source 1..20: mol_type = other RNA
  ncRNA 1..20: ncRNA_class = sgRNA
gaggactgtgaacccctcgt

SEQ ID NO: 3094 - RNA, 20 nt, synthetic construct
  source 1..20: mol_type = other RNA
  ncRNA 1..20: ncRNA_class = sgRNA
cgttttggggaacccacgag

SEQ ID NO: 3095 - RNA, 20 nt, synthetic construct
  source 1..20: mol_type = other RNA
  ncRNA 1..20: ncRNA_class = sgRNA
acgttttggggaacccacga

SEQ ID NO: 3096 - RNA, 20 nt, synthetic construct
  source 1..20: mol_type = other RNA
  ncRNA 1..20: ncRNA_class = sgRNA
cacgttttggggaacccacg

SEQ ID NO: 3097 - RNA, 20 nt, synthetic construct
  source 1..20: mol_type = other RNA
  ncRNA 1..20: ncRNA_class = sgRNA
gggcaagggtccacgttttg

SEQ ID NO: 3098 - RNA, 20 nt, synthetic construct
  source 1..20: mol_type = other RNA
  ncRNA 1..20: ncRNA_class = sgRNA
ctcgtgggttccccaaaacg

SEQ ID NO: 3099 - RNA, 20 nt, synthetic construct
  source 1..20: mol_type = other RNA
  ncRNA 1..20: ncRNA_class = sgRNA
cccatgccataggcgcactg

SEQ ID NO: 3100 - RNA, 20 nt, synthetic construct
  source 1..20: mol_type = other RNA
  ncRNA 1..20: ncRNA_class = sgRNA
gaggctcccaagctcagcga

SEQ ID NO: 3101 - RNA, 20 nt, synthetic construct
  source 1..20: mol_type = other RNA
  ncRNA 1..20: ncRNA_class = sgRNA
ctacgtcagccagacctcgc

SEQ ID NO: 3102 - RNA, 20 nt, synthetic construct
  source 1..20: mol_type = other RNA
  ncRNA 1..20: ncRNA_class = sgRNA
cgtcagccagacctcgcagg

SEQ ID NO: 3103 - RNA, 20 nt, synthetic construct
  source 1..20: mol_type = other RNA
  ncRNA 1..20: ncRNA_class = sgRNA
gtcagccagacctcgcagga

SEQ ID NO: 3104 - RNA, 20 nt, synthetic construct
  source 1..20: mol_type = other RNA
  ncRNA 1..20: ncRNA_class = sgRNA
gaaggagtctcggcgcgcca

SEQ ID NO: 3105 - RNA, 20 nt, synthetic construct
  source 1..20: mol_type = other RNA
  ncRNA 1..20: ncRNA_class = sgRNA
ggcgcgccgagactccttcg

SEQ ID NO: 3106 - RNA, 20 nt, synthetic construct
  source 1..20: mol_type = other RNA
  ncRNA 1..20: ncRNA_class = sgRNA
cgcgccgagactccttcgcg

SEQ ID NO: 3107 - RNA, 20 nt, synthetic construct
  source 1..20: mol_type = other RNA
  ncRNA 1..20: ncRNA_class = sgRNA
gcgcgggccgttccccgcga

SEQ ID NO: 3108 - RNA, 20 nt, synthetic construct
  source 1..20: mol_type = other RNA
  ncRNA 1..20: ncRNA_class = sgRNA
ccgcgcttcccggacccgtg

SEQ ID NO: 3109 - RNA, 20 nt, synthetic construct
  source 1..20: mol_type = other RNA
  ncRNA 1..20: ncRNA_class = sgRNA
acccgtgcggcggccccgag

SEQ ID NO: 3110 - RNA, 20 nt, synthetic construct
  source 1..20: mol_type = other RNA
  ncRNA 1..20: ncRNA_class = sgRNA
ttgacttaattcctcgagat

SEQ ID NO: 3111 - RNA, 20 nt, synthetic construct
  source 1..20: mol_type = other RNA
  ncRNA 1..20: ncRNA_class = sgRNA
gttgtgtataactttgtctg

SEQ ID NO: 3112 - RNA, 20 nt, synthetic construct
  source 1..20: mol_type = other RNA
  ncRNA 1..20: ncRNA_class = sgRNA
catacaaacggcctatctcg

SEQ ID NO: 3113 - RNA, 20 nt, synthetic construct
  source 1..20: mol_type = other RNA
  ncRNA 1..20: ncRNA_class = sgRNA
gagatgcagacgaagcacac

SEQ ID NO: 3114 - RNA, 20 nt, synthetic construct
  source 1..20: mol_type = other RNA
  ncRNA 1..20: ncRNA_class = sgRNA
ctcgatggtgaatgacagtg

SEQ ID NO: 3115 - RNA, 20 nt, synthetic construct
  source 1..20: mol_type = other RNA
  ncRNA 1..20: ncRNA_class = sgRNA
taaaagggcgatctaatgaa

SEQ ID NO: 3116 - RNA, 20 nt, synthetic construct
  source 1..20: mol_type = other RNA
  ncRNA 1..20: ncRNA_class = sgRNA
ataaaagggcgatctaatga

SEQ ID NO: 3117 - RNA, 20 nt, synthetic construct
  source 1..20: mol_type = other RNA
  ncRNA 1..20: ncRNA_class = sgRNA
atttatgatatgacaacgtc

SEQ ID NO: 3118 - RNA, 20 nt, synthetic construct
  source 1..20: mol_type = other RNA
  ncRNA 1..20: ncRNA_class = sgRNA
aaggtcgatttggagaagtt

SEQ ID NO: 3119 - RNA, 20 nt, synthetic construct
  source 1..20: mol_type = other RNA
  ncRNA 1..20: ncRNA_class = sgRNA
ccacgaacgttcttctctag

SEQ ID NO: 3120 - RNA, 20 nt, synthetic construct
  source 1..20: mol_type = other RNA
  ncRNA 1..20: ncRNA_class = sgRNA
cctctagagaagaacgttcg

SEQ ID NO: 3121 - RNA, 20 nt, synthetic construct
  source 1..20: mol_type = other RNA
  ncRNA 1..20: ncRNA_class = sgRNA
agaacgttcgtggttccgtg

SEQ ID NO: 3122 - RNA, 20 nt, synthetic construct
  source 1..20: mol_type = other RNA
  ncRNA 1..20: ncRNA_class = sgRNA
tgtctgctgctataaatccc

SEQ ID NO: 3123 - RNA, 20 nt, synthetic construct
  source 1..20: mol_type = other RNA
  ncRNA 1..20: ncRNA_class = sgRNA
tacttggactcagctctggt

SEQ ID NO: 3124 - RNA, 20 nt, synthetic construct
  source 1..20: mol_type = other RNA
  ncRNA 1..20: ncRNA_class = sgRNA
gtgtcagattatcatgagca

SEQ ID NO: 3125 - RNA, 20 nt, synthetic construct
  source 1..20: mol_type = other RNA
  ncRNA 1..20: ncRNA_class = sgRNA
cttgctctgtccacggcgag

SEQ ID NO: 3126 - RNA, 20 nt, synthetic construct
  source 1..20: mol_type = other RNA
  ncRNA 1..20: ncRNA_class = sgRNA
ctgtattgcagacttaggac

SEQ ID NO: 3127 - RNA, 20 nt, synthetic construct
  source 1..20: mol_type = other RNA
  ncRNA 1..20: ncRNA_class = sgRNA
tattgctccaaaccacagag

SEQ ID NO: 3128 - RNA, 20 nt, synthetic construct
  source 1..20: mol_type = other RNA
  ncRNA 1..20: ncRNA_class = sgRNA
attgctccaaaccacagagt

SEQ ID NO: 3129 - RNA, 20 nt, synthetic construct
  source 1..20: mol_type = other RNA
  ncRNA 1..20: ncRNA_class = sgRNA
ggaatcatcgagaacttcag

SEQ ID NO: 3130 - RNA, 20 nt, synthetic construct
  source 1..20: mol_type = other RNA
  ncRNA 1..20: ncRNA_class = sgRNA
acgtgctgacatctatgcaa

SEQ ID NO: 3131 - RNA, 20 nt, synthetic construct
  source 1..20: mol_type = other RNA
  ncRNA 1..20: ncRNA_class = sgRNA
attgctcgacgatgttccat

SEQ ID NO: 3132 - RNA, 20 nt, synthetic construct
  source 1..20: mol_type = other RNA
  ncRNA 1..20: ncRNA_class = sgRNA
gctcgacgatgttccattgg

SEQ ID NO: 3133 - RNA, 20 nt, synthetic construct
  source 1..20: mol_type = other RNA
  ncRNA 1..20: ncRNA_class = sgRNA
ggtatgccaatggagcagct

SEQ ID NO: 3134 - RNA, 20 nt, synthetic construct
  source 1..20: mol_type = other RNA
  ncRNA 1..20: ncRNA_class = sgRNA
cagctaggcttacagcattg

SEQ ID NO: 3135 - RNA, 20 nt, synthetic construct
  source 1..20: mol_type = other RNA
  ncRNA 1..20: ncRNA_class = sgRNA
aacgtgcggtgggatcgtgc

SEQ ID NO: 3136 - RNA, 20 nt, synthetic construct
  source 1..20: mol_type = other RNA
  ncRNA 1..20: ncRNA_class = sgRNA
ccgacttctgaacgtgcggt

SEQ ID NO: 3137 - RNA, 20 nt, synthetic construct
  source 1..20: mol_type = other RNA
  ncRNA 1..20: ncRNA_class = sgRNA
cccgacttctgaacgtgcgg

SEQ ID NO: 3138 - RNA, 20 nt, synthetic construct
  source 1..20: mol_type = other RNA
  ncRNA 1..20: ncRNA_class = sgRNA
atgatagtcactgacaacaa

SEQ ID NO: 3139 - RNA, 20 nt, synthetic construct
  source 1..20: mol_type = other RNA
  ncRNA 1..20: ncRNA_class = sgRNA
ctgtggcttctcacagatgg

SEQ ID NO: 3140 - RNA, 20 nt, synthetic construct
  source 1..20: mol_type = other RNA
  ncRNA 1..20: ncRNA_class = sgRNA
ttccagaataaagtcatggt

SEQ ID NO: 3141 - RNA, 20 nt, synthetic construct
  source 1..20: mol_type = other RNA
  ncRNA 1..20: ncRNA_class = sgRNA
aatatgactagcaacaagtc

SEQ ID NO: 3142 - RNA, 20 nt, synthetic construct
  source 1..20: mol_type = other RNA
  ncRNA 1..20: ncRNA_class = sgRNA
gatatggcaactcccagtgg

SEQ ID NO: 3143 - RNA, 20 nt, synthetic construct
  source 1..20: mol_type = other RNA
  ncRNA 1..20: ncRNA_class = sgRNA
acagatatggcaactcccag

SEQ ID NO: 3144 - RNA, 20 nt, synthetic construct
  source 1..20: mol_type = other RNA
  ncRNA 1..20: ncRNA_class = sgRNA
gcttctgctgccggttaacg

SEQ ID NO: 3145 - RNA, 20 nt, synthetic construct
  source 1..20: mol_type = other RNA
  ncRNA 1..20: ncRNA_class = sgRNA
tctactgctaccgcgttaac

SEQ ID NO: 3146 - RNA, 20 nt, synthetic construct
  source 1..20: mol_type = other RNA
  ncRNA 1..20: ncRNA_class = sgRNA
gcagaagctgagttcaacct

SEQ ID NO: 3147 - RNA, 20 nt, synthetic construct
  source 1..20: mol_type = other RNA
  ncRNA 1..20: ncRNA_class = sgRNA
cctgggaaaccggcaagacg

SEQ ID NO: 3148 - RNA, 20 nt, synthetic construct
  source 1..20: mol_type = other RNA
  ncRNA 1..20: ncRNA_class = sgRNA
cggcaagacgcggaagctca

SEQ ID NO: 3149 - RNA, 20 nt, synthetic construct
  source 1..20: mol_type = other RNA
  ncRNA 1..20: ncRNA_class = sgRNA
gcggtcatcttccaggatga

SEQ ID NO: 3150 - RNA, 20 nt, synthetic construct
  source 1..20: mol_type = other RNA
  ncRNA 1..20: ncRNA_class = sgRNA
gttgatgttgttggcacacg

SEQ ID NO: 3151 - RNA, 20 nt, synthetic construct
  source 1..20: mol_type = other RNA
  ncRNA 1..20: ncRNA_class = sgRNA
attgagctggacaccctggt

SEQ ID NO: 3152 - RNA, 20 nt, synthetic construct
  source 1..20: mol_type = other RNA
  ncRNA 1..20: ncRNA_class = sgRNA
aaagcgacctttccccacca

SEQ ID NO: 3153 - RNA, 20 nt, synthetic construct
  source 1..20: mol_type = other RNA
  ncRNA 1..20: ncRNA_class = sgRNA
ttcagagcagtttgagacag

SEQ ID NO: 3154 - RNA, 20 nt, synthetic construct
  source 1..20: mol_type = other RNA
  ncRNA 1..20: ncRNA_class = sgRNA
agtcaagatctttccctatg

SEQ ID NO: 3155 - RNA, 20 nt, synthetic construct
  source 1..20: mol_type = other RNA
  ncRNA 1..20: ncRNA_class = sgRNA
taggttgcccttggcgtgga

SEQ ID NO: 3156 - RNA, 20 nt, synthetic construct
  source 1..20: mol_type = other RNA
  ncRNA 1..20: ncRNA_class = sgRNA
atcaccgccttccacgccaa

SEQ ID NO: 3157 - RNA, 20 nt, synthetic construct
  source 1..20: mol_type = other RNA
  ncRNA 1..20: ncRNA_class = sgRNA
acctacaggagtacctgacg

SEQ ID NO: 3158 - RNA, 20 nt, synthetic construct
  source 1..20: mol_type = other RNA
  ncRNA 1..20: ncRNA_class = sgRNA
agctgatgacatgccgcgtc

SEQ ID NO: 3159 - RNA, 20 nt, synthetic construct
  source 1..20: mol_type = other RNA
  ncRNA 1..20: ncRNA_class = sgRNA
gacgcggcatgtcatcagct

SEQ ID NO: 3160 - RNA, 20 nt, synthetic construct
  source 1..20: mol_type = other RNA
  ncRNA 1..20: ncRNA_class = sgRNA
gcggcatgtcatcagctggg

SEQ ID NO: 3161 - RNA, 20 nt, synthetic construct
  source 1..20: mol_type = other RNA
  ncRNA 1..20: ncRNA_class = sgRNA
tgggcagctccctcgcccgg

SEQ ID NO: 3162 - RNA, 20 nt, synthetic construct
  source 1..20: mol_type = other RNA
  ncRNA 1..20: ncRNA_class = sgRNA
gtggaggtgagcaatccccc

SEQ ID NO: 3163 - RNA, 20 nt, synthetic construct
  source 1..20: mol_type = other RNA
  ncRNA 1..20: ncRNA_class = sgRNA
tgtggaggtgagcaatcccc

SEQ ID NO: 3164 - RNA, 20 nt, synthetic construct
  source 1..20: mol_type = other RNA
  ncRNA 1..20: ncRNA_class = sgRNA
atggagtgtgatcactgtgg

SEQ ID NO: 3165 - RNA, 20 nt, synthetic construct
  source 1..20: mol_type = other RNA
  ncRNA 1..20: ncRNA_class = sgRNA
cacatggagtgtgatcactg

SEQ ID NO: 3166 - RNA, 20 nt, synthetic construct
  source 1..20: mol_type = other RNA
  ncRNA 1..20: ncRNA_class = sgRNA
acagtgatcacactccatgt

SEQ ID NO: 3167 - RNA, 20 nt, synthetic construct
  source 1..20: mol_type = other RNA
  ncRNA 1..20: ncRNA_class = sgRNA
gtgatcacactccatgtggg

SEQ ID NO: 3168 - RNA, 20 nt, synthetic construct
  source 1..20: mol_type = other RNA
  ncRNA 1..20: ncRNA_class = sgRNA
gggaaagcccaaagtcacac

SEQ ID NO: 3169 - RNA, 20 nt, synthetic construct
  source 1..20: mol_type = other RNA
  ncRNA 1..20: ncRNA_class = sgRNA
cagagtagggtccagacgca

SEQ ID NO: 3170 - RNA, 20 nt, synthetic construct
  source 1..20: mol_type = other RNA
  ncRNA 1..20: ncRNA_class = sgRNA
tctggaccctactctgtctg

SEQ ID NO: 3171 - RNA, 20 nt, synthetic construct
  source 1..20: mol_type = other RNA
  ncRNA 1..20: ncRNA_class = sgRNA
gtggatgacctggctaacag

SEQ ID NO: 3172 - RNA, 20 nt, synthetic construct
  source 1..20: mol_type = other RNA
  ncRNA 1..20: ncRNA_class = sgRNA
tggatgacctggctaacagt

SEQ ID NO: 3173 - RNA, 20 nt, synthetic construct
  source 1..20: mol_type = other RNA
  ncRNA 1..20: ncRNA_class = sgRNA
ggtgggaactgcaagataca

SEQ ID NO: 3174 - RNA, 20 nt, synthetic construct
  source 1..20: mol_type = other RNA
  ncRNA 1..20: ncRNA_class = sgRNA
cagagccatggagtagacat

SEQ ID NO: 3175 - RNA, 20 nt, synthetic construct
  source 1..20: mol_type = other RNA
  ncRNA 1..20: ncRNA_class = sgRNA
gcagaccgatgtctactcca

SEQ ID NO: 3176 - RNA, 20 nt, synthetic construct
  source 1..20: mol_type = other RNA
  ncRNA 1..20: ncRNA_class = sgRNA
acatctcgctgtaatgcagt

SEQ ID NO: 3177 - RNA, 20 nt, synthetic construct
  source 1..20: mol_type = other RNA
  ncRNA 1..20: ncRNA_class = sgRNA
cgcaccttggaaccaaatgg

SEQ ID NO: 3178 - RNA, 20 nt, synthetic construct
  source 1..20: mol_type = other RNA
  ncRNA 1..20: ncRNA_class = sgRNA
ccttcatgctttcgacacag

SEQ ID NO: 3179 - RNA, 20 nt, synthetic construct
  source 1..20: mol_type = other RNA
  ncRNA 1..20: ncRNA_class = sgRNA
gtccttcatgctttcgacac

SEQ ID NO: 3180 - RNA, 20 nt, synthetic construct
  source 1..20: mol_type = other RNA
  ncRNA 1..20: ncRNA_class = sgRNA
cccctgtgtcgaaagcatga

SEQ ID NO: 3181 - RNA, 20 nt, synthetic construct
  source 1..20: mol_type = other RNA
  ncRNA 1..20: ncRNA_class = sgRNA
acaacgtgttgagagatcga

SEQ ID NO: 3182 - RNA, 20 nt, synthetic construct
  source 1..20: mol_type = other RNA
  ncRNA 1..20: ncRNA_class = sgRNA
gtgagacgttgactgagtgc

SEQ ID NO: 3183 - RNA, 20 nt, synthetic construct
  source 1..20: mol_type = other RNA
  ncRNA 1..20: ncRNA_class = sgRNA
tgagacgttgactgagtgct

SEQ ID NO: 3184 - RNA, 20 nt, synthetic construct
  source 1..20: mol_type = other RNA
  ncRNA 1..20: ncRNA_class = sgRNA
gtgctgggaccacgacccag

SEQ ID NO: 3185 - RNA, 20 nt, synthetic construct
  source 1..20: mol_type = other RNA
  ncRNA 1..20: ncRNA_class = sgRNA
ccgtctcacagcccagtgtg

SEQ ID NO: 3186 - RNA, 20 nt, synthetic construct
  source 1..20: mol_type = other RNA
  ncRNA 1..20: ncRNA_class = sgRNA
gaagcgttctgccacacact

What is claimed is:

1. A pharmaceutical composition for treating a disorder having a symptom caused, at least in part, by intercellular signaling mediated through a transmembrane receptor, the composition comprising:
(i) an RNA-guided nuclease or a nucleic acid encoding an RNA-guided nuclease; and
(ii) at least one guide RNA or a nucleic acid encoding at least one guide RNA targeting a gene encoding the transmembrane receptor.

2. The pharmaceutical composition of claim 1, wherein the disorder is a musculoskeletal disorder.

3. The pharmaceutical composition of claim 2, wherein the musculoskeletal disorder is selected from the group consisting of Rheumatoid Arthritis, Gout, Osteoarthritis, Osteoporosis, Intervertebral disc disease (IVDD), Psoriatic arthritis (PsA), Arthritis, Polymyositis, Proliferative synovitis, Malignant bone neoplasm, Sarcoid Myopathy, Cortex Bone Disorders, Idiopathic Scoliosis, Tendinopathy, Myofibrillar Myopathy, Enthesis-Related Arthritis, Ankylosing spondylitis, Degenerative, polyarthritis, Arthropathy, Osteitis Deformans, Prolapsed Lumbar Disc, Polymyositis Ossificans, Idiopathic Polymyositis, Luft Disease, Adult-onset Still's Disease, Osteoarthrosis Deformans, and Bachet's Disease.

4. The pharmaceutical composition of claim 2, wherein the musculoskeletal disorder is selected from the group consisting of Rheumatoid arthritis, Idiopathic osteoporosis, Post-menopausal osteoporosis, Paget's disease, Osteoarthritis, Juvenile idiopathic arthritis (JIA), Still's disease, Ankylosing spondylitis, Polymyalgia rheumatica, Arthritis, Secondary malignant neoplasm of bone, Type II, Mucolipidosis, Sjogren's Syndrome, Psoriatic arthritis, Rheumatism, Castleman's disease, Degenerative Polyarthritis, Arthropathy, Bone neoplasm, Osteoporosis, Massive osteolysis, Bone fracture healing, Systemic sclerosis, Systemic Juvenile Idiopathic, Arthritis, and Synovitis.

5. The pharmaceutical composition of claim 2, wherein the musculoskeletal disorder is selected from the group consisting of Arthritis, Infectious Intermittent joint effusion, Ankylosing spondylitis, Arthritis, Osteoarthritis, Spondylarthrites, Plantar fasciitis, Degenerative polyarthritis, Hemophilic arthropathy, Inflammatory myopathy with abundant macrophages, Polymyositis, Tendinosis, Malignant Bone Neoplasm, Osteoporosis, Psoriatic arthritis, Rheumatism, Rheumatoid arthritis, Adult Still's disease, Juvenile arthritis, Early rheumatoid arthritis, Palindromic rheumatism, Gout, Infectious Arthritis, Myotonic dystrophy, Dermatomyositis, Hemophilic arthropathy, Osteopenia, Sjogren's syndrome, Juvenile Idiopathic Arthritis, Myasthenia gravis, Osteolysis, Inflammation, Degenerative polyarthritis, Osteitis deformans, Pigmented villonodular synovitis, or Hyperphosphatasemia with bone disease.

6. The pharmaceutical composition of claim 2, wherein the musculoskeletal disorder is selected from the group consisting of Loeys-Dietz Syndrome, Osteoarthrosis, Marfan Syndrome, Aortic aneurysm (familial thoracic 3), and a Craniofacial abnormality.

7. The pharmaceutical composition of claim 1, wherein the disorder is a neoplasia.

8. The pharmaceutical composition of claim 7, wherein the neoplasia is selected from the group consisting of Osteosarcoma, Colon Cancer, Metastasis (General), Lung Cancer, Multiple Myeloma. Breast Cancer, Solid Tumors, Lymphoma, Pancreatic Cancer, Stomach Cancer, Epithelial Ovarian Cancer, Mammary Neoplasms, Oropharyngeal Carcinoma, Renal Cell Carcinoma, Chondrosarcoma, Esophageal Neoplasms, B-Cell Lymphoma, Cutaneous Lymphoma T-Cell, Leukemia, Thyroid Carcinoma, Skin carcinogenesis, Cholectoral Cancer, Glioma, Liver Cancer, Melanoma, Neuroblastoma, Polycystic Ovary Syndrome, Glioblastoma, Prostate Cancer, Cervical Cancer, Ovarian Cancer, Bladder Cancer, Squamous cell carcinoma, Kaposi Sarcoma, Oral Cavity Cancer, Leiomyosarcoma, Malignant Peripheral Nerve Sheath Tumor, and Ewing's Sarcoma.

9. The pharmaceutical composition of claim 7, wherein the neoplasia is selected from the group consisting of Multiple myeloma, Lung Cancer, Stomach Cancer, Breast Cancer, Kidney Cancer, Neoplasm Metastasis, Colorectal Neoplasms, Ovarian cancer, Osteosarcoma, Cholangiocarcinoma, Leukemia, Prostate cancer, Plasmacytoma, Pancreatic cancer, Cervical cancer, Lymphoma, Liver neoplasms, Neuroblastoma, Melanoma, Mastocytosis, Endometrial cancer, Bladder Cancer, Squamous cell carcinoma, Gallbladder carcinoma, Adenocarcinoma, Thyroid Cancer, prostate neoplasms, stomach cancer, liver carcinoma, pituitary neoplasms, hepatoblastoma, multiple myeloma, hepatocellular adenoma, breast carcinoma, carcinogenesis, leukemia, colon carcinoma, melanoma, metastasis (general), lung cancer, pancreatic cancer, Kaposi sarcoma, medulloblastoma, carcinoma of bladder, squamous cell carcinoma, mast cell neoplasm, glioma, mastocytoma, brain neoplasms, ovarian neoplasms, bone neoplasm, rhabdomyosarcoma, solid tumors, metastatic kidney cancer, and metastatic renal cell carcinoma

10. The pharmaceutical composition of claim 7, wherein the neoplasia is selected from the group consisting of a Neoplasm, Glioblastoma, Astrocytoma, Adenocarcinoma, Osteosarcoma, Squamous cell carcinoma, Metastasis, Ameloblastoma, Cholangiocarcinoma, Choriocarcinoma, Ovarian cancer, Prostate cancer, Lung Cancer, Larynx Cancer, Breast Cancer, Lip and Oral Cavity Carcinoma, Squamous intraepithelial lesion, Neuroblastoma, Non-Hodgkin lymphomas, Malignant Neoplasms, Skin Neoplasms, Neuroblastoma, Neoplasm Metastasis, Colorectal Cancer, Fibrosarcoma, Myeloid Leukemia, Myelofibrosis, Hodgkin Lymphomas, Non-Small Cell Lung Carcinoma, Cervical Cancer, Liver cancer, Extrapulmonary small cell carcinoma, Basal cell carcinoma, Kidney cancer, Pancreatic carcinoma, Mesothelioma, Gastric cancer, Polycystic Ovary Syndrome, Chordoma, Cholangiocarcinoma, Malignant ascites, Nasopharyngeal carcinoma, Head and Neck Carcinoma, Cancer metastasis, Prostate carcinoma, Fibrosarcoma, Liver carcinoma, Carcinoma of bladder, T-Cell Lymphoblastic Leukemia, Bladder Neoplasm, melanoma, Leukemia, acute myeloid leukemia, Hepatocellular carcinoma, Colorectal cancer, a Lymphoma, Mycosis fungoides, and Sézary syndrome.

11. The pharmaceutical composition of claim 7, wherein the neoplasia is selected from the group consisting of Pancreatic cancer, Multiple self-healing squamous epithelioma (Ferguson-Smith disease), Pancreatic cancer, Gastrointestinal Stromal Tumors (GIST), Hereditary Nonpolyposis Colorectal Cancer (Lynch Syndrome), Metastasis, Colorectal Carcinoma, Bone neoplasms, Anaplastic carcinoma, Spindle-Cell carcinoma, Malignant Bone Neoplasm, Lung neoplasms, and Malignant brain neoplasm.

12. The pharmaceutical composition of claim 1, wherein the disorder is a neurological disorder.

13. The pharmaceutical composition of claim 12, wherein the neurological disorder is selected from the group consisting of Acute Thrombotic Stroke, Epilepsy, Multiple Sclerosis, and Alzheimer's Disease.

14. The pharmaceutical composition of claim 1, wherein the disorder is a cardiac disorder.

15. The pharmaceutical composition of claim 14, wherein the cardiac disorder is selected from the group consisting of Acute Myocardial Infarction, refractory heart failure, arrhythmias, pericarditis, myocarditis, sepsis-induced cardiomyopathy, Acute Decompensated Heart Failure, Refractory Idiopathic Pericarditis, Atherosclerosis, coronary artery disease, myocardial infarction, and cardiac remodeling.

16. The pharmaceutical composition of claim 14, wherein the cardiac disorder is atherosclerosis or abdominal aortic aneurism.

17. The pharmaceutical composition of claim 1, wherein the disorder is an inflammatory disorder.

18. The pharmaceutical composition of claim 17, wherein the inflammatory disorder is selected from the group consisting of Autoinflammatory Disease (AID), Cryopyrin Associated Periodic syndrome (CAPS), Familial Mediterranean Fever (FMF), TNF-Receptor Associated Periodic Syndrome (TRAPS), Hyper-IgD Syndrome (HIDS), Systemic Lupus Erythematosus (SLE), and Fibrosis.

19. The pharmaceutical composition of claim 17, wherein the inflammatory disorder is selected from the group consisting of a cytokine storm, acute local inflammation, inflammatory bowel disease, Crohn's disease, sepsis, Experimental sepsis, and Castleman's disease

20. The pharmaceutical composition of claim 1, wherein the disorder is a digestive disorder.

21. The pharmaceutical composition of claim 20, wherein the digestive disorder is selected from the group consisting of Inflammatory Bowel Disease (IBD), Gastroesophageal reflux disease (GERD), and Non-HP-associated Peptic Ulcer Disease.

22. The pharmaceutical composition of claim 1, wherein the disorder is a respiratory disorder.

23. The pharmaceutical composition of claim 22, wherein the respiratory disorder is Asthma or Pulmonary Fibrosis.

24. The pharmaceutical composition of claim 1, wherein the disorder is a renal, metabolic, or ophthalmic disorder.

25. The pharmaceutical composition of claim 24, wherein the renal, metabolic, or ophthalmic disorder is selected from the group consisting of Chronic Kidney Disease, Type 2 Diabetes, an Eye Disease, Uveitis, Scleritis, Sjogren asthenia, and dry eye.

26. The pharmaceutical composition of claim 1, wherein the disorder is an autoimmune disorder.

27. The pharmaceutical composition of claim 26, wherein the autoimmune disorder is Systemic Lupus Erythematosus.

28. The pharmaceutical composition of claim 1, wherein the disorder is acute synovitis, chronic synovitis, inflammatory arthritis, or immune-mediated arthritides.

29. The pharmaceutical composition of claim 1, wherein the disorder is an autoimmune or inflammatory disorder.

30. The pharmaceutical composition of claim 28, wherein the autoimmune or inflammatory disorder is selected from the group consisting of an Allergy, Asthma, Multiple sclerosis, Psoriasis, Inflammatory bowel disease, Autoimmune experimental uveitis, Colitis, Hypersensitivity reaction disease, Diabetes, Crohn's disease, Systemic lupus erythematosus, Pulmonary sarcoidosis, Leishmaniasis, Experimental autoimmune encephalomyelitis, HTLV-1-associated myelopathy, Tropical spastic paraparesis, Scleroderma, an Idiopathic inflammatory myopathy, polymyositis, and dermatomyositis.

31. The pharmaceutical composition of any one of claims 1-30, wherein the transmembrane receptor is an interleukin-1 receptor.

32. The pharmaceutical composition of claim 31, wherein the at least one guide RNA targets a gene selected from the group consisting of IL1R1, IL1RAP, IL1R5, IL1R6, IL1R7, and IL1R9.

33. The pharmaceutical composition of claim 31, wherein the at least one guide RNA targets an IL1R1 gene.

34. The pharmaceutical composition of claim 33, wherein the at least one guide RNA comprises a crRNA sequence selected from the group consisting of SEQ ID NOS: 680-811.

35. The pharmaceutical composition of claim 33, wherein the at least one guide RNA comprises a crRNA sequence selected from the group consisting of SEQ ID NOS: 825-892 and 3336-3405.

36. The pharmaceutical composition of claim 33, wherein the at least one guide RNA comprises a crRNA sequence selected from the group consisting of SEQ ID NOS: 893-967.

37. The pharmaceutical composition of claim 33, wherein the at least one guide RNA comprises a crRNA sequence selected from the group consisting of SEQ ID NOS: 968-1039.

38. The pharmaceutical composition of claim 33, wherein the at least one guide RNA comprises a crRNA sequence selected from the group consisting of SEQ ID NOS: 3491-3513.

39. The pharmaceutical composition of claim 31, wherein the at least one guide RNA targets an IL1RAP gene.

40. The pharmaceutical composition of claim 39, wherein the at least one guide RNA comprises a crRNA sequence selected from the group consisting of SEQ ID NOS: 1040-1194.

41. The pharmaceutical composition of claim 39, wherein the at least one guide RNA comprises a crRNA sequence selected from the group consisting of SEQ ID NOS: 1204-1271 and 3421-3490.

42. The pharmaceutical composition of claim 39, wherein the at least one guide RNA comprises a crRNA sequence selected from the group consisting of SEQ ID NOS: 1272-1348.

43. The pharmaceutical composition of claim 39, wherein the at least one guide RNA comprises a crRNA sequence selected from the group consisting of SEQ ID NOS: 1349-1424.

44. The pharmaceutical composition of claim 39, wherein the at least one guide RNA comprises a crRNA sequence selected from the group consisting of SEQ ID NOS: 3514-3543.

45. The pharmaceutical composition of any one of claims 1-30, wherein the transmembrane receptor is an interleukin-6 receptor.

46. The pharmaceutical composition of claim 45, wherein the at least one guide RNA targets an IL6R gene.

47. The pharmaceutical composition of claim 46, wherein the at least one guide RNA comprises a crRNA sequence selected from the group consisting of SEQ ID NOS: 1746-1920.

48. The pharmaceutical composition of claim 46, wherein the at least one guide RNA comprises a crRNA sequence selected from the group consisting of SEQ ID NOS: 3544-3566.

49. The pharmaceutical composition of claim 45, wherein the at least one guide RNA targets an IL6ST gene.

50. The pharmaceutical composition of claim 49, wherein the at least one guide RNA comprises a crRNA sequence selected from the group consisting of SEQ ID NOS: 1969-2176.

51. The pharmaceutical composition of claim 49, wherein the at least one guide RNA comprises a crRNA sequence selected from the group consisting of SEQ ID NOS: 3567-3606.

52. The pharmaceutical composition of any one of claims 1-30, wherein the transmembrane receptor is a tumor necrosis factor receptor.

53. The pharmaceutical composition of claim 52, wherein the at least one guide RNA targets a TNFRSF1A gene.

54. The pharmaceutical composition of claim 53, wherein the at least one guide RNA comprises a crRNA sequence selected from the group consisting of SEQ ID NOS: 2179-2383.

55. The pharmaceutical composition of claim 53, wherein the at least one guide RNA comprises a crRNA sequence selected from the group consisting of SEQ ID NOS: 3607-3647.

56. The pharmaceutical composition of claim 52, wherein the at least one guide RNA targets a TNFRSF1B gene.

57. The pharmaceutical composition of claim 56, wherein the at least one guide RNA comprises a crRNA sequence selected from the group consisting of SEQ ID NOS: 2396-2622.

58. The pharmaceutical composition of claim 56, wherein the at least one guide RNA comprises a crRNA sequence selected from the group consisting of SEQ ID NOS: 3648-3692.

59. The pharmaceutical composition of claim 52, wherein the at least one guide RNA targets a TNFRSF3 gene.

60. The pharmaceutical composition of claim 59, wherein the at least one guide RNA comprises a crRNA sequence selected from the group consisting of SEQ ID NOS: 2643-2852.

61. The pharmaceutical composition of claim 59, wherein the at least one guide RNA comprises a crRNA sequence selected from the group consisting of SEQ ID NOS: 3693-3713.

62. The pharmaceutical composition of claim 52, wherein the at least one guide RNA targets a TNFRSF4 gene.

63. The pharmaceutical composition of claim 62, wherein the at least one guide RNA comprises a crRNA sequence selected from the group consisting of SEQ ID NOS: 2867-3035.

64. The pharmaceutical composition of claim 62, wherein the at least one guide RNA comprises a crRNA sequence selected from the group consisting of SEQ ID NOS: 3714-3740.

65. The pharmaceutical composition of claim 52, wherein the at least one guide RNA targets a TNFRSF11A gene.

66. The pharmaceutical composition of claim 65, wherein the at least one guide RNA comprises a crRNA sequence selected from the group consisting of SEQ ID NOS: 3042-3331.

67. The pharmaceutical composition of claim 65, wherein the at least one guide RNA comprises a crRNA sequence selected from the group consisting of SEQ ID NOS: 3741-3788.

68. The pharmaceutical composition of any one of claims 1-30, wherein the transmembrane receptor is a transforming growth factor beta receptor.

69. The pharmaceutical composition of claim 68, wherein the at least one guide RNA targets a TGFBR1 gene.

70. The pharmaceutical composition of claim 69, wherein the at least one guide RNA comprises a crRNA sequence selected from the group consisting of SEQ ID NOS: 1425-1544.

71. The pharmaceutical composition of claim 69, wherein the at least one guide RNA comprises a crRNA sequence selected from the group consisting of SEQ ID NOS: 3789-3813.

72. The pharmaceutical composition of claim 68, wherein the at least one guide RNA targets a TGFBR2 gene.

73. The pharmaceutical composition of claim 72, wherein the at least one guide RNA comprises a crRNA sequence selected from the group consisting of SEQ ID NOS: 1547-1734.

74. The pharmaceutical composition of claim 72, wherein the at least one guide RNA comprises a crRNA sequence selected from the group consisting of SEQ ID NOS: 3814-3865.

75. The pharmaceutical composition of any one of claims 1-73, wherein the RNA-guided nuclease or a nucleic acid encoding an RNA-guided nuclease is the RNA-guided nuclease.

76. The pharmaceutical composition of any one of claims 1-73, wherein the RNA-guided nuclease or a nucleic acid encoding an RNA-guided nuclease is DNA encoding the RNA-guided nuclease.

77. The pharmaceutical composition of any one of claims 1-73, wherein the RNA-guided nuclease or a nucleic acid encoding an RNA-guided nuclease is mRNA encoding the RNA-guided nuclease.

78. The pharmaceutical composition of any one of claims 1-77, wherein the RNA-guided nuclease is a Cas protein.

79. The pharmaceutical composition of claim 78, wherein the Cas protein is a Cas9 protein.

80. The pharmaceutical composition of claim 78, wherein the Cas9 protein is an S. pyogenes Cas9 polypeptide.

81. The pharmaceutical composition of claim 78, wherein the Cas9 protein is selected from the group consisting of esCas9, hfCas9, peCas9, and ARCas9.

82. The pharmaceutical composition of any one of claims 1-81, wherein the at least one guide RNA or a nucleic acid encoding at least one guide RNA is the at least one guide RNA.

83. The pharmaceutical composition of any one of claims 1-81, wherein the at least one guide RNA or a nucleic acid encoding at least one guide RNA is DNA encoding the at least one guide RNA.

84. The pharmaceutical composition of any one of claims 1-81, comprising a nucleic acid encoding both the RNA-guided nuclease and the at least one guide RNA.

85. The pharmaceutical composition of any one of claims 1-84, wherein the at least one guide RNA is a single guide RNA (sgRNA).

86. The pharmaceutical composition of any one of claims 1-85, wherein the at least one guide RNA targets a human gene.

87. The pharmaceutical composition of any one of claims 1-85, wherein the at least one guide RNA targets a canine gene.

88. The pharmaceutical composition of any one of claims 1-85, wherein the at least one guide RNA targets an equine gene.

89. The pharmaceutical composition of any one of claims 1-85, wherein the at least one guide RNA targets a feline gene.

90. The pharmaceutical composition of any one of claims 1-85, wherein the at least one guide RNA targets a mammalian gene.

91. The pharmaceutical composition of any one of claims 1-90, wherein the composition comprises one or more viral vectors collectively comprising the (i) RNA-guided nuclease or a nucleic acid encoding an RNA-guided nuclease, and (ii) at least one guide RNA or a nucleic acid encoding at least one guide RNA targeting a gene encoding the transmembrane receptor.

92. The pharmaceutical composition of claim 91, wherein the one of more viral vectors comprise a recombinant virus selected from a retrovirus, an adenovirus, an adeno-associated virus, a lentivirus, and a herpes simplex virus-1.

93. The pharmaceutical composition of claim 91, wherein the one of more viral vectors comprise a recombinant adeno-associated virus (AAV).

94. The pharmaceutical composition of claim 93, wherein the recombinant AAV is of serotype 5 (AAV5).

95. The pharmaceutical composition of claim 93, wherein the recombinant AAV is of serotype 6 (AAV6).

96. The pharmaceutical composition of any one of claims 1-90, wherein the composition comprises one or more lipid nanoparticles (LNP) collectively comprising the (i) RNA-guided nuclease or a nucleic acid encoding an RNA-guided nuclease, and (ii) at least one guide RNA or a nucleic acid encoding at least one guide RNA targeting a gene encoding the transmembrane receptor.

97. The pharmaceutical composition of claim 96, wherein the one or more LNP comprises:
a first plurality of LNP encapsulating the RNA-guided nuclease or a nucleic acid encoding an RNA-guided nuclease; and
a second plurality of LNP encapsulating the at least one guide RNA or a nucleic acid encoding at least one guide RNA.

98. The pharmaceutical composition of claim 96, wherein the one or more LNP comprises a plurality of LNP encapsulating both the (i) RNA-guided nuclease or a nucleic acid encoding an RNA-guided nuclease, and (ii) at least one guide RNA or a nucleic acid encoding at least one guide RNA targeting a gene encoding the transmembrane receptor.

99. The pharmaceutical composition of any one of claims 96-98, wherein the one or more LNP comprises a component selected from the group consisting of 3-(didodecylamino)-N1,N1,4-tridodecyl-1-piperazineethanamine (KL10), N1-[2-(didodecylamino)ethyl]-N1,N4,N4-tridodecyl-1,4-piperazinediethanamine (KL22), 14,25-ditridecyl-15,18,21,24-tetraaza-octatriacontane (KL25), 1,2-dilinoleyloxy-N,N-dimethylaminopropane (DLin-DMA), 2,2-dilinoleyl-4-dimethylaminomethyl-[1,3]-dioxolane (DLin-K-DMA), heptatriaconta-6,9,28,31-tetraen-19-yl 4-(dimethylamino) butanoate (DLin-MC3-DMA), 2,2-dilinoleyl-4-(2-dimethylaminoethyl)-[1,3]-dioxolane (DLin-KC2-DMA), 1,2-dioleyloxy-N,N-dimethylaminopropane (DODMA), 2-({8-[(3.beta.)-cholest-5-en-3-yloxy]octyl}oxy)-N,N-dimethyl-3-[(9Z,12Z)-octadeca-9,12-dien-1-yloxy]propan-1-amine (Octyl-CLinDMA), (2R)-2-({8-[(3.beta.)-cholest-5-en-3-yloxy]octyl}oxy)-N,N-dimethyl-3-[(9Z-,12Z)-octadeca-9,12-dien-1-yloxy]propan-1-amine (Octyl-CLinDMA (2R)), (2S)-2-({8-[(3.beta.)-cholest-5-en-3-yloxy]octyl}oxy)-N,N-dimethyl-3-[(9Z-,12Z)-octadeca-9,12-dien-1-yloxy]propan-1-amine (Octyl-CLinDMA (2S)), a lipid including a cyclic amine group, and a mixture thereof.

100. The pharmaceutical composition of any one of claims 96-99, wherein the LNP comprises a component selected from the group consisting of 1,2-dilinoleoyl-sn-glycero-3-phosphocholine (DLPC), 1,2-dimyristoyl-sn-glycero-phosphocholine (DMPC), 1,2-dioleoyl-sn-glycero-3-phosphocholine (DOPC), 1,2-dipalmitoyl-sn-glycero-3-phosphocholine (DPPC), 1,2-distearoyl-sn-glycero-3-phosphocholine (DSPC), 1,2-diundecanoyl-sn-glycero-phosphocholine (DUPC), 1-palmitoyl-2-oleoyl-sn-glycero-3-phosphocholine (POPC), 1,2-di-O-octadecenyl-sn-glycero-3-phosphocholine (18:0 Diether PC), 1-oleoyl-2-cholesterylhemisuccinoyl-sn-glycero-3-phosphocholine (OChemsPC), 1-hexadecyl-sn-glycero-3-phosphocholine (C16 Lyso PC), 1,2-dilinolenoyl-sn-glycero-3-phosphocholine, 1,2-diarachidonoyl-sn-glycero-3-phosphocholine, 1,2-didocosahexaenoyl-sn-glycero-3-phosphocholine, 1,2-dioleoyl-sn-glycero-3-phosphoethanolamine (DOPE), 1,2-diphytanoyl-sn-glycero-3-phosphoethanolamine (ME 16.0 PE), 1,2-distearoyl-sn-glycero-3-phosphoethanolamine, 1,2-dilinoleoyl-sn-glycero-3-phosphoethanolamine, 1,2-dilinolenoyl-sn-glycero-3-phosphoethanolamine, 1,2-diarachidonoyl-sn-glycero-3-phosphoethanolamine, 1,2-didocosahexaenoyl-sn-glycero-3-phosphoethanolamine, 1,2-dioleoyl-sn-glycero-3-phospho-rac-(1-glycerol) sodium salt (DOPG), sphingomyelin (SM), and a mixture thereof.

101. The pharmaceutical composition of any one of claims 96-296, wherein the LNP comprises a component selected from the group consisting of PEG-modified phosphatidylethanolamines, PEG-modified phosphatidic acids, PEG-modified ceramides, PEG-modified dialkylamines, PEG-modified diacylglycerols, PEG-modified dialkylglycerols, and mixtures thereof. For example, a PEG lipid may be PEG-c-DOMG, PEG-DMG, PEG-DLPE, PEG-DMPE, PEG-DPPC, PEG-DMA, a PEG-DSPE lipid, and a mixture thereof.

102. The pharmaceutical composition of any one of claims 96-100, wherein the LNP comprises a component selected from the group consisting of a cholesterol, fecosterol, stigmasterol, stigmastanol, sitosterol, β-sitosterol, lupeol, betulin, ursolic acid, oleanolic acid, campesterol, fucosterol, brassicasterol, ergosterol, 9,11-dehydroergosterol, tomatidine, tomatine, α-tocopherol, and a mixture thereof.

103. The pharmaceutical composition of any one of claims 1-90, wherein the composition comprises one or more liposomes collectively comprising the (i) RNA-guided nuclease or a nucleic acid encoding an RNA-guided nuclease, and (ii) at least one guide RNA or a nucleic acid encoding at least one guide RNA targeting a gene encoding the transmembrane receptor.

104. The pharmaceutical composition of claim 103, wherein the one or more liposomes comprises:
a first plurality of liposomes encapsulating the RNA-guided nuclease or a nucleic acid encoding an RNA-guided nuclease; and
a second plurality of liposomes encapsulating the at least one guide RNA or a nucleic acid encoding at least one guide RNA.

105. The pharmaceutical composition of claim 103, wherein the one or more liposomes comprises a plurality of liposomes encapsulating both the (i) RNA-guided nuclease or a nucleic acid encoding an RNA-guided nuclease, and (ii) at least one guide RNA or a nucleic acid encoding at least one guide RNA targeting a gene encoding the transmembrane receptor.

106. The pharmaceutical composition of any one of claims 1-90, wherein the composition comprises one or more virus-like particles collectively comprising the (i) RNA-guided nuclease or a nucleic acid encoding an RNA-guided nuclease, and (ii) at least one guide RNA or a nucleic acid encoding at least one guide RNA targeting a gene encoding the transmembrane receptor.

107. The pharmaceutical composition of claim 106, wherein the one or more virus-like particles comprises:
a first plurality of virus-like particles encapsulating the RNA-guided nuclease or a nucleic acid encoding an RNA-guided nuclease; and
a second plurality of virus-like particles encapsulating the at least one guide RNA or a nucleic acid encoding at least one guide RNA.

108. The pharmaceutical composition of claim 106, wherein the one or more virus-like particles comprises a plurality of virus-like particles encapsulating both the (i) RNA-guided nuclease or a nucleic acid encoding an RNA-guided nuclease, and (ii) at least one guide RNA or a nucleic acid encoding at least one guide RNA targeting a gene encoding the transmembrane receptor.

109. The pharmaceutical composition of any one of claims 1-108, wherein the composition is formulated for parenteral administration.

110. The pharmaceutical composition of any one of claims 1-108, wherein the composition is formulated for intra-articular injection within a joint of the subject.

111. The pharmaceutical composition of any one of claims 1-108, wherein the composition is formulated for intradiscal injection.

112. The pharmaceutical composition of any one of claims 1-108, wherein the composition is formulated for peridiscal injection.

113. The pharmaceutical composition of any one of claims 1-108, wherein the composition is formulated for intravertebral injection.

114. A method for treating a disorder having a symptom caused, at least in part, by intracellular signaling mediated through a transmembrane receptor in a subject in need thereof, comprising:
administering a therapeutically effective amount of a composition, wherein the composition comprises:
(i) an RNA-guided nuclease or a nucleic acid encoding an RNA-guided nuclease; and
(ii) at least one guide RNA or a nucleic acid encoding at least one guide RNA targeting a gene encoding the transmembrane receptor.

115. The method of claim 114, wherein the at least one guide RNA targets a gene selected from the group consisting of IL1R1, IL1RAP, IL1R5, IL1R6, IL1R7, and IL1R9.

116. The method of claim 114, wherein the at least one guide RNA targets an IL1R1 gene.

117. The method of claim 116, wherein the at least one guide RNA comprises a crRNA sequence selected from the group consisting of SEQ ID NOS: 680-758.

118. The method of claim 116, wherein the at least one guide RNA comprises a crRNA sequence selected from the group consisting of SEQ ID NOS: 825-864.

119. The method of claim 116, wherein the at least one guide RNA comprises a crRNA sequence selected from the group consisting of SEQ ID NOS: 893-922.

120. The method of claim 116, wherein the at least one guide RNA comprises a crRNA sequence selected from the group consisting of SEQ ID NOS: 968-997.

121. The method of claim 116, wherein the at least one guide RNA comprises a crRNA sequence selected from the group consisting of SEQ ID NOS: 3491-3503.

122. The method of claim 114, wherein the at least one guide RNA targets an IL1RAP gene.

123. The method of claim 122, wherein the at least one guide RNA comprises a crRNA sequence selected from the group consisting of SEQ ID NOS: 1040-1122.

124. The method of claim 122, wherein the at least one guide RNA comprises a crRNA sequence selected from the group consisting of SEQ ID NOS: 1204-1271 and 3421-3458.

125. The method of claim 122, wherein the at least one guide RNA comprises a crRNA sequence selected from the group consisting of SEQ ID NOS: 1272-1301.

126. The method of claim 122, wherein the at least one guide RNA comprises a crRNA sequence selected from the group consisting of SEQ ID NOS: 1349-1378.

127. The method of claim 122, wherein the at least one guide RNA comprises a crRNA sequence selected from the group consisting of SEQ ID NOS: 3514-3529.

128. The method of claim 114, wherein the transmembrane receptor is an interleukin-6 receptor.

129. The method of claim 128, wherein the at least one guide RNA targets an IL6R gene.

130. The method of claim 129, wherein the at least one guide RNA comprises a crRNA sequence selected from the group consisting of SEQ ID NOS: 1746-1834.

131. The method of claim 129, wherein the at least one guide RNA comprises a crRNA sequence selected from the group consisting of SEQ ID NOS: 3544-3553.

132. The method of claim 128, wherein the at least one guide RNA targets an IL6ST gene.

133. The method of claim 132, wherein the at least one guide RNA comprises a crRNA sequence selected from the group consisting of SEQ ID NOS: 1969-2037.

134. The method of claim 132, wherein the at least one guide RNA comprises a crRNA sequence selected from the group consisting of SEQ ID NOS: 3567-3574.

135. The method of claim 114, wherein the transmembrane receptor is a tumor necrosis factor receptor.

136. The method of claim 135, wherein the at least one guide RNA targets a TNFRSF1A gene.

137. The method of claim 136, wherein the at least one guide RNA comprises a crRNA sequence selected from the group consisting of SEQ ID NOS: 2179-2247.

138. The method of claim 136, wherein the at least one guide RNA comprises a crRNA sequence selected from the group consisting of SEQ ID NOS: 3607-3621.

139. The method of claim 135, wherein the at least one guide RNA targets a TNFRSF1B gene.

140. The method of claim 139, wherein the at least one guide RNA comprises a crRNA sequence selected from the group consisting of SEQ ID NOS: 2396-2482.

141. The method of claim 139, wherein the at least one guide RNA comprises a crRNA sequence selected from the group consisting of SEQ ID NOS: 3648-3673.

142. The method of claim 135, wherein the at least one guide RNA targets a TNFRSF3 gene.

143. The method of claim 142, wherein the at least one guide RNA comprises a crRNA sequence selected from the group consisting of SEQ ID NOS: 2643-2737.

144. The method of claim 142, wherein the at least one guide RNA comprises a crRNA sequence selected from the group consisting of SEQ ID NOS: 3693-3698.

145. The method of claim 135, wherein the at least one guide RNA targets a TNFRSF4 gene.

146. The method of claim 145, wherein the at least one guide RNA comprises a crRNA sequence selected from the group consisting of SEQ ID NOS: 2867-2950.

147. The method of claim 145, wherein the at least one guide RNA comprises a crRNA sequence selected from the group consisting of SEQ ID NOS: 3714-3734.

148. The method of claim 135, wherein the at least one guide RNA targets a TNFRSF11A gene.

149. The method of claim 148, wherein the at least one guide RNA comprises a crRNA sequence selected from the group consisting of SEQ ID NOS: 3042-3106.

150. The method of claim 148, wherein the at least one guide RNA comprises a crRNA sequence selected from the group consisting of SEQ ID NOS: 3741-3754.

151. The method of claim 114, wherein the transmembrane receptor is a transforming growth factor beta receptor.

152. The method of claim 151, wherein the at least one guide RNA targets a TGFBR1 gene.

153. The method of claim 152, wherein the at least one guide RNA comprises a crRNA sequence selected from the group consisting of SEQ ID NOS: 1425-1454.

154. The method of claim 152, wherein the at least one guide RNA comprises a crRNA sequence selected from the group consisting of SEQ ID NOS: 3789-3791.

155. The method of claim 151, wherein the at least one guide RNA targets a TGFBR2 gene.

156. The method of claim 155, wherein the at least one guide RNA comprises a crRNA sequence selected from the group consisting of SEQ ID NOS: 1547-1580.

157. The method of claim 155, wherein the at least one guide RNA comprises a crRNA sequence selected from the group consisting of SEQ ID NOS: 3814-3819.

158. The method of claim 114, wherein editing of a genomic copy of the gene for the transmembrane receptor by the RNA-guided nuclease and at least one guide RNA results in a genomic sequence encoding a membrane-bound form of the transmembrane receptor lacking signaling function.

159. The method of claim 158, wherein the at least one guide RNA targets a gene selected from the group consisting of IL1R1, IL1RAP, IL1R5, IL1R6, IL1R7, and IL1R9.

160. The method of claim 158, wherein the at least one guide RNA targets an IL1R1 gene.

161. The method of claim 160, wherein the at least one guide RNA comprises a crRNA sequence selected from the group consisting of SEQ ID NOS: 759-808.

162. The method of claim 160, wherein the at least one guide RNA comprises a crRNA sequence selected from the group consisting of SEQ ID NOS: 3336-3401.

163. The method of claim 160, wherein the at least one guide RNA comprises a crRNA sequence selected from the group consisting of SEQ ID NOS: 942-967.

164. The method of claim 160, wherein the at least one guide RNA comprises a crRNA sequence selected from the group consisting of SEQ ID NOS: 1010-1039.

165. The method of claim 160, wherein the at least one guide RNA comprises a crRNA sequence selected from the group consisting of SEQ ID NOS: 3505-3513.

166. The method of claim 158, wherein the at least one guide RNA targets an IL1RAP gene.

167. The method of claim 166, wherein the at least one guide RNA comprises a crRNA sequence selected from the group consisting of SEQ ID NOS: 1123-1180.

168. The method of claim 166, wherein the at least one guide RNA comprises a crRNA sequence selected from the group consisting of SEQ ID NOS: 3459-3485.

169. The method of claim 166, wherein the at least one guide RNA comprises a crRNA sequence selected from the group consisting of SEQ ID NOS: 1323-1348.

170. The method of claim 166, wherein the at least one guide RNA comprises a crRNA sequence selected from the group consisting of SEQ ID NOS: 1397-1424.

171. The method of claim 166, wherein the at least one guide RNA comprises a crRNA sequence selected from the group consisting of SEQ ID NOS: 3533-3543.

172. The method of claim 158, wherein the transmembrane receptor is an interleukin-6 receptor.

173. The method of claim 172, wherein the at least one guide RNA targets an IL6ST gene.

174. The method of claim 173, wherein the at least one guide RNA comprises a crRNA sequence selected from the group consisting of SEQ ID NOS: 2038-2102.

175. The method of claim 173, wherein the at least one guide RNA comprises a crRNA sequence selected from the group consisting of SEQ ID NOS: 3595-3606.

176. The method of claim 158, wherein the transmembrane receptor is a tumor necrosis factor receptor.

177. The method of claim 176, wherein the at least one guide RNA targets a TNFRSF1A gene.

178. The method of claim 177, wherein the at least one guide RNA comprises a crRNA sequence selected from the group consisting of SEQ ID NOS: 2248-2369.

179. The method of claim 177, wherein the at least one guide RNA comprises a crRNA sequence selected from the group consisting of SEQ ID NOS: 3623-3647.

180. The method of claim 176, wherein the at least one guide RNA targets a TNFRSF1B gene.

181. The method of claim 180, wherein the at least one guide RNA comprises a crRNA sequence selected from the group consisting of SEQ ID NOS: 2483-2574.

182. The method of claim 180, wherein the at least one guide RNA comprises a crRNA sequence selected from the group consisting of SEQ ID NOS: 3681-3692.

183. The method of claim 176, wherein the at least one guide RNA targets a TNFRSF3 gene.

184. The method of claim 183, wherein the at least one guide RNA comprises a crRNA sequence selected from the group consisting of SEQ ID NOS: 2738-2846.

185. The method of claim 183, wherein the at least one guide RNA comprises a crRNA sequence selected from the group consisting of SEQ ID NOS: 3703-3713.

186. The method of claim 176, wherein the at least one guide RNA targets a TNFRSF4 gene.

187. The method of claim 186, wherein the at least one guide RNA comprises a crRNA sequence selected from the group consisting of SEQ ID NOS: 2951-2981.

188. The method of claim 186, wherein the at least one guide RNA comprises a crRNA sequence selected from the group consisting of SEQ ID NOS: 3738-3740.

189. The method of claim 176, wherein the at least one guide RNA targets a TNFRSF11A gene.

190. The method of claim 189, wherein the at least one guide RNA comprises a crRNA sequence selected from the group consisting of SEQ ID NOS: 3107-3322.

191. The method of claim 189, wherein the at least one guide RNA comprises a crRNA sequence selected from the group consisting of SEQ ID NOS: 3757-3788.

192. The method of claim 158, wherein the transmembrane receptor is a transforming growth factor beta receptor.

193. The method of claim 192, wherein the at least one guide RNA targets a TGFBR1 gene.

194. The method of claim 193, wherein the at least one guide RNA comprises a crRNA sequence selected from the group consisting of SEQ ID NOS: 1455-1534.

195. The method of claim 193, wherein the at least one guide RNA comprises a crRNA sequence selected from the group consisting of SEQ ID NOS: 3792-3813.

196. The method of claim 192, wherein the at least one guide RNA targets a TGFBR2 gene.

197. The method of claim 196, wherein the at least one guide RNA comprises a crRNA sequence selected from the group consisting of SEQ ID NOS: 1581-1724.

198. The method of claim 196, wherein the at least one guide RNA comprises a crRNA sequence selected from the group consisting of SEQ ID NOS: 3821-3865.

199. The method of claim 114, wherein editing of a genomic copy of the gene for the transmembrane receptor by the RNA-guided nuclease and at least one guide RNA results in a genomic sequence encoding a soluble form of the transmembrane receptor.

200. The method of claim 199, wherein the at least one guide RNA targets a gene selected from the group consisting of IL1R1, IL1RAP, IL1R5, IL1R6, IL1R7, and IL1R9.

201. The method of claim 200, wherein the at least one guide RNA targets an IL1R1 gene.

202. The method of claim 201, wherein the at least one guide RNA comprises a crRNA sequence selected from the group consisting of SEQ ID NOS: 809-811.

203. The method of claim 201, wherein the at least one guide RNA comprises a crRNA sequence selected from the group consisting of SEQ ID NOS: 3402-3405.

204. The method of claim 201, wherein the at least one guide RNA comprises a crRNA sequence selected from the group consisting of SEQ ID NOS: 923-941.

205. The method of claim 201, wherein the at least one guide RNA comprises a crRNA sequence selected from the group consisting of SEQ ID NOS: 998-1009.

206. The method of claim 201, wherein the at least one guide RNA comprises a crRNA sequence of SEQ ID NO 3504.

207. The method of claim 200, wherein the at least one guide RNA targets an IL1RAP gene.

208. The method of claim 207, wherein the at least one guide RNA comprises a crRNA sequence selected from the group consisting of SEQ ID NOS: 1181-1194.

209. The method of claim 207, wherein the at least one guide RNA comprises a crRNA sequence selected from the group consisting of SEQ ID NOS: 3481-3490.

210. The method of claim 207, wherein the at least one guide RNA comprises a crRNA sequence selected from the group consisting of SEQ ID NOS: 1302-1322.

211. The method of claim 207, wherein the at least one guide RNA comprises a crRNA sequence selected from the group consisting of SEQ ID NOS: 1379-1396.

212. The method of claim 207, wherein the at least one guide RNA comprises a crRNA sequence selected from the group consisting of SEQ ID NOS: 3530-3532.

213. The method of claim 199, wherein the transmembrane receptor is an interleukin-6 receptor.

214. The method of claim 213, wherein the at least one guide RNA targets an IL6R gene.

215. The method of claim 214, wherein the at least one guide RNA comprises a crRNA sequence selected from the group consisting of SEQ ID NOS: 1835-1920.

216. The method of claim 214, wherein the at least one guide RNA comprises a crRNA sequence selected from the group consisting of SEQ ID NOS: 3554-3566.

217. The method of claim 213, wherein the at least one guide RNA targets an IL6ST gene.

218. The method of claim 217, wherein the at least one guide RNA comprises a crRNA sequence selected from the group consisting of SEQ ID NOS: 2103-2176.

219. The method of claim 217, wherein the at least one guide RNA comprises a crRNA sequence selected from the group consisting of SEQ ID NOS: 3575-3594.

220. The method of claim 199, wherein the transmembrane receptor is a tumor necrosis factor receptor.

221. The method of claim 220, wherein the at least one guide RNA targets a TNFRSF1A gene.

222. The method of claim 221, wherein the at least one guide RNA comprises a crRNA sequence selected from the group consisting of SEQ ID NOS: 2370-2383.

223. The method of claim 221, wherein the at least one guide RNA comprises a crRNA sequence selected from the group consisting of SEQ ID NOS: 3621-3622.

224. The method of claim 220, wherein the at least one guide RNA targets a TNFRSF1B gene.

225. The method of claim 224, wherein the at least one guide RNA comprises a crRNA sequence selected from the group consisting of SEQ ID NOS: 2575-2622.

226. The method of claim 224, wherein the at least one guide RNA comprises a crRNA sequence selected from the group consisting of SEQ ID NOS: 3664-3680.

227. The method of claim 220, wherein the at least one guide RNA targets a TNFRSF3 gene.

228. The method of claim 227, wherein the at least one guide RNA comprises a crRNA sequence selected from the group consisting of SEQ ID NOS: 2847-2852.

229. The method of claim 227, wherein the at least one guide RNA comprises a crRNA sequence selected from the group consisting of SEQ ID NOS: 3699-3702.

230. The method of claim 220, wherein the at least one guide RNA targets a TNFRSF4 gene.

231. The method of claim 230, wherein the at least one guide RNA comprises a crRNA sequence selected from the group consisting of SEQ ID NOS: 2982-3035.

232. The method of claim 230, wherein the at least one guide RNA comprises a crRNA sequence selected from the group consisting of SEQ ID NOS: 3730-3737.

233. The method of claim 220, wherein the at least one guide RNA targets a TNFRSF11A gene.

234. The method of claim 233, wherein the at least one guide RNA comprises a crRNA sequence selected from the group consisting of SEQ ID NOS: 3323-3331.

235. The method of claim 233, wherein the at least one guide RNA comprises a crRNA sequence selected from the group consisting of SEQ ID NOS: 3749-3756.

236. The method of claim 199, wherein the transmembrane receptor is a transforming growth factor beta receptor.

237. The method of claim 236, wherein the at least one guide RNA targets a TGFBR1 gene.

238. The method of claim 237, wherein the at least one guide RNA comprises a crRNA sequence selected from the group consisting of SEQ ID NOS: 1535-1544.

239. The method of claim 237, wherein the at least one guide RNA comprises a crRNA sequence of 3792.

240. The method of claim 236, wherein the at least one guide RNA targets a TGFBR2 gene.

241. The method of claim 240, wherein the at least one guide RNA comprises a crRNA sequence selected from the group consisting of SEQ ID NOS: 1725-1734.

242. The method of claim 240, wherein the at least one guide RNA comprises a crRNA sequence selected from the group consisting of SEQ ID NOS: 3820-3822.

243. The method of any one of claims 114-242, wherein the disorder is a musculoskeletal disorder.

244. The method of claim 243, wherein the musculoskeletal disorder is selected from the group consisting of Rheumatoid Arthritis, Gout, Osteoarthritis, Osteoporosis, Intervertebral disc disease (IVDD), Psoriatic arthritis (PsA), Arthritis, Polymyositis, Proliferative synovitis, Malignant bone neoplasm, Sarcoid Myopathy, Cortex Bone Disorders, Idiopathic Scoliosis, Tendinopathy, Myofibrillar Myopathy, Enthesis-Related Arthritis, Ankylosing spondylitis, Degenerative, polyarthritis, Arthropathy, Osteitis Deformans, Prolapsed Lumbar Disc, Polymyositis Ossificans, Idiopathic Polymyositis, Luft Disease, Adult-onset Still's Disease, Osteoarthrosis Deformans, and Bachet's Disease.

245. The method of claim 243, wherein the musculoskeletal disorder is selected from the group consisting of Rheumatoid arthritis, Idiopathic osteoporosis, Post-menopausal osteoporosis, Paget's disease, Osteoarthritis, Juvenile idiopathic arthritis (JIA), Still's disease, Ankylosing spondylitis, Polymyalgia rheumatica, Arthritis, Secondary malignant neoplasm of bone, Type II, Mucolipidosis, Sjogren's Syndrome, Psoriatic arthritis, Rheumatism, Castleman's disease, Degenerative Polyarthritis, Arthropathy, Bone neoplasm, Osteoporosis, Massive osteolysis, Bone fracture healing, Systemic sclerosis, Systemic Juvenile Idiopathic, Arthritis, and Synovitis.

246. The method of claim 243, wherein the musculoskeletal disorder is selected from the group consisting of Arthritis, Infectious Intermittent joint effusion, Ankylosing spondylitis, Arthritis, Osteoarthritis, Spondylarthrites, Plantar fasciitis, Degenerative polyarthritis, Hemophilic arthropathy, Inflammatory myopathy with abundant macrophages, Polymyositis, Tendinosis, Malignant Bone Neoplasm, Osteoporosis, Psoriatic arthritis, Rheumatism, Rheumatoid arthritis, Adult Still's disease, Juvenile arthritis, Early rheumatoid arthritis, Palindromic rheumatism, Gout, Infectious Arthritis, Myotonic dystrophy, Dermatomyositis, Hemophilic arthropathy, Osteopenia, Sjogren's syndrome, Juvenile Idiopathic Arthritis, Myasthenia gravis, Osteolysis, Inflammation, Degenerative polyarthritis, Osteitis deformans, Pigmented villonodular synovitis, or Hyperphosphatasemia with bone disease.

247. The method of claim 243, wherein the musculoskeletal disorder is selected from the group consisting of Loeys-Dietz Syndrome, Osteoarthrosis, Marfan Syndrome, Aortic aneurysm (familial thoracic 3), and a Craniofacial abnormality.

248. The method of any one of claims 114-242, wherein the disorder is a neoplasia.

249. The method of claim 248, wherein the neoplasia is selected from the group consisting of Osteosarcoma, Colon Cancer, Metastasis (General), Lung Cancer, Multiple Myeloma. Breast Cancer, Solid Tumors, Lymphoma, Pancreatic Cancer, Stomach Cancer, Epithelial Ovarian Cancer, Mammary Neoplasms, Oropharyngeal Carcinoma, Renal Cell Carcinoma, Chondrosarcoma, Esophageal Neoplasms, B-Cell Lymphoma, Cutaneous Lymphoma T-Cell, Leukemia, Thyroid Carcinoma, Skin carcinogenesis, Cholectoral Cancer, Glioma, Liver Cancer, Melanoma, Neuroblastoma, Polycystic Ovary Syndrome, Glioblastoma, Prostate Cancer, Cervical Cancer, Ovarian Cancer, Bladder Cancer, Squamous cell carcinoma, Kaposi Sarcoma, Oral Cavity Cancer, Leiomyosarcoma, Malignant Peripheral Nerve Sheath Tumor, and Ewing's Sarcoma.

250. The method of claim 248, wherein the neoplasia is selected from the group consisting of Multiple myeloma, Lung Cancer, Stomach Cancer, Breast Cancer, Kidney Cancer, Neoplasm Metastasis, Colorectal Neoplasms, Ovarian cancer, Osteosarcoma, Cholangiocarcinoma, Leukemia, Prostate cancer, Plasmacytoma, Pancreatic cancer, Cervical cancer, Lymphoma, Liver neoplasms, Neuroblastoma, Melanoma, Mastocytosis, Endometrial cancer, Bladder Cancer, Squamous cell carcinoma, Gallbladder carcinoma, Adenocarcinoma, Thyroid Cancer, prostate neoplasms, stomach cancer, liver carcinoma, pituitary neoplasms, hepatoblastoma, multiple myeloma, hepatocellular adenoma, breast carcinoma, carcinogenesis, leukemia, colon carcinoma, melanoma, metastasis (general), lung cancer, pancreatic cancer, Kaposi sarcoma, medulloblastoma, carcinoma of bladder, squamous cell carcinoma, mast cell neoplasm, glioma, mastocytoma, brain neoplasms, ovarian neoplasms, bone neoplasm, rhabdomyosarcoma, solid tumors, metastatic kidney cancer, and metastatic renal cell carcinoma

251. The method of claim 248, wherein the neoplasia is selected from the group consisting of a Neoplasm, Glioblastoma, Astrocytoma, Adenocarcinoma, Osteosarcoma, Squamous cell carcinoma, Metastasis, Ameloblastoma, Cholangiocarcinoma, Choriocarcinoma, Ovarian cancer, Prostate cancer, Lung Cancer, Larynx Cancer, Breast Cancer, Lip and Oral Cavity Carcinoma, Squamous intraepithelial lesion, Neuroblastoma, Non-Hodgkin lymphomas, Malignant Neoplasms, Skin Neoplasms, Neuroblastoma, Neoplasm Metastasis, Colorectal Cancer, Fibrosarcoma, Myeloid Leukemia, Myelofibrosis, Hodgkin Lymphomas, Non-Small Cell Lung Carcinoma, Cervical Cancer, Liver cancer, Extrapulmonary small cell carcinoma, Basal cell carcinoma, Kidney cancer, Pancreatic carcinoma, Mesothelioma, Gastric cancer, Polycystic Ovary Syndrome, Chordoma, Cholangiocarcinoma, Malignant ascites, Nasopharyngeal carcinoma, Head and Neck Carcinoma, Cancer metastasis, Prostate carcinoma, Fibrosarcoma, Liver carcinoma, Carcinoma of bladder, T-Cell Lymphoblastic Leukemia, Bladder Neoplasm, melanoma, Leukemia, acute myeloid leukemia, Hepatocellular carcinoma, Colorectal cancer, a Lymphoma, Mycosis fungoides, and Sézary syndrome.

252. The method of claim 248, wherein the neoplasia is selected from the group consisting of Pancreatic cancer, Multiple self-healing squamous epithelioma (Ferguson-Smith disease), Pancreatic cancer, Gastrointestinal Stromal Tumors (GIST), Hereditary Nonpolyposis Colorectal Cancer (Lynch Syndrome), Metastasis, Colorectal Carcinoma, Bone neoplasms, Anaplastic carcinoma, Spindle-Cell carcinoma, Malignant Bone Neoplasm, Lung neoplasms, and Malignant brain neoplasm.

253. The method of any one of claims 114-242, wherein the disorder is a neurological disorder.

254. The method of claim 253, wherein the neurological disorder is selected from the group consisting of Acute Thrombotic Stroke, Epilepsy, Multiple Sclerosis, and Alzheimer's Disease.

255. The method of any one of claims 114-242, wherein the disorder is a cardiac disorder.

256. The method of claim 255, wherein the cardiac disorder is selected from the group consisting of Acute Myocardial Infarction, refractory heart failure, arrhythmias, pericarditis, myocarditis, sepsis-induced cardiomyopathy, Acute Decompensated Heart Failure, Refractory Idiopathic Pericarditis, Atherosclerosis, coronary artery disease, myocardial infarction, and cardiac remodeling.

257. The method of claim 255, wherein the cardiac disorder is atherosclerosis or abdominal aortic aneurism.

258. The method of any one of claims 114-242, wherein the disorder is an inflammatory disorder.

259. The method of claim 258, wherein the inflammatory disorder is selected from the group consisting of Autoinflammatory Disease (AID), Cryopyrin Associated Periodic syndrome (CAPS), Familial Mediterranean Fever (FMF), TNF-Receptor Associated Periodic Syndrome (TRAPS), Hyper-IgD Syndrome (HIDS), Systemic Lupus Erythematosus (SLE), and Fibrosis.

260. The method of claim 258, wherein the inflammatory disorder is selected from the group consisting of a cytokine storm, acute local inflammation, inflammatory bowel disease, Crohn's disease, sepsis, Experimental sepsis, and Castleman's disease

261. The method of any one of claims 114-242, wherein the disorder is a digestive disorder.

262. The method of claim 261, wherein the digestive disorder is selected from the group consisting of Inflammatory Bowel Disease (IBD), Gastroesophageal reflux disease (GERD), and Non-HP-associated Peptic Ulcer Disease.

263. The method of any one of claims 114-242, wherein the disorder is a respiratory disorder.

264. The method of claim 263, wherein the respiratory disorder is Asthma or Pulmonary Fibrosis.

265. The method of any one of claims 114-242, wherein the disorder is a renal, metabolic, or ophthalmic disorder.

266. The method of claim 265, wherein the renal, metabolic, or ophthalmic disorder is selected from the group consisting of Chronic Kidney Disease, Type 2 Diabetes, an Eye Disease, Uveitis, Scleritis, Sjogren asthenia, and dry eye.

267. The method of any one of claims 114-242, wherein the disorder is an autoimmune disorder.

268. The method of claim 267, wherein the autoimmune disorder is Systemic Lupus Erythematosus.

269. The method of any one of claims 114-242, wherein the disorder is an autoimmune or inflammatory disorder.

270. The method of claim 269, wherein the autoimmune or inflammatory disorder is selected from the group consisting of an Allergy, Asthma, Multiple sclerosis, Psoriasis, Inflammatory bowel disease, Autoimmune experimental uveitis, Colitis, Hypersensitivity reaction disease, Diabetes, Crohn's disease, Systemic lupus erythematosus, Pulmonary sarcoidosis, Leishmaniasis, Experimental autoimmune encephalomyelitis, HTLV-1-associated myelopathy, Tropical spastic paraparesis, Scleroderma, an Idiopathic inflammatory myopathy, polymyositis, and dermatomyositis.

271. The method of any one of claims 114-270, wherein the RNA-guided nuclease or a nucleic acid encoding an RNA-guided nuclease is the RNA-guided nuclease.

272. The method of any one of claims 114-270, wherein the RNA-guided nuclease or a nucleic acid encoding an RNA-guided nuclease is DNA encoding the RNA-guided nuclease.

273. The method of any one of claims 114-270, wherein the RNA-guided nuclease or a nucleic acid encoding an RNA-guided nuclease is mRNA encoding the RNA-guided nuclease.

274. The method of any one of claims 114-273, wherein the RNA-guided nuclease is a Cas protein.

275. The method of claim 274, wherein the Cas protein is a Cas9 protein.

276. The method of claim 274, wherein the Cas9 protein is an S. pyogenes Cas9 polypeptide.

277. The method of claim 274, wherein the Cas9 protein is selected from the group consisting of esCas9, hfCas9, peCas9, and ARCas9.

278. The method of any one of claims 114-277, wherein the at least one guide RNA or a nucleic acid encoding at least one guide RNA is the at least one guide RNA.

279. The method of any one of claims 114-277, wherein the at least one guide RNA or a nucleic acid encoding at least one guide RNA is DNA encoding the at least one guide RNA.

280. The method of any one of claims 114-277, comprising a nucleic acid encoding both the RNA-guided nuclease and the at least one guide RNA.

281. The method of any one of claims 114-280, wherein the at least one guide RNA is a single guide RNA (sgRNA).

282. The method of any one of claims 114-281, wherein the at least one guide RNA targets a human gene.

283. The method of any one of claims 114-281, wherein the at least one guide RNA targets a canine gene.

284. The method of any one of claims 114-281, wherein the at least one guide RNA targets an equine gene.

285. The method of any one of claims 114-281, wherein the at least one guide RNA targets a feline gene.

286. The method of any one of claims 114-281, wherein the at least one guide RNA targets a mammalian gene.

287. The method of any one of claims 114-286, wherein the composition comprises one or more viral vectors collectively comprising the (i) RNA-guided nuclease or a nucleic acid encoding an RNA-guided nuclease, and (ii) at least one guide RNA or a nucleic acid encoding at least one guide RNA targeting a gene encoding the transmembrane receptor.

288. The method of claim 287, wherein the one of more viral vectors comprise a recombinant virus selected from a retrovirus, an adenovirus, an adeno-associated virus, a lentivirus, and a herpes simplex virus-1.

289. The method of claim 287, wherein the one of more viral vectors comprise a recombinant adeno-associated virus (AAV).

290. The method of claim 289, wherein the recombinant AAV is of serotype 5 (AAV5).

291. The method of claim 289, wherein the recombinant AAV is of serotype 6 (AAV6).

292. The method of any one of claims 114-286, wherein the composition comprises one or more lipid nanoparticles (LNP) collectively comprising the (i) RNA-guided nuclease or a nucleic acid encoding an RNA-guided nuclease, and (ii) at least one guide RNA or a nucleic acid encoding at least one guide RNA targeting a gene encoding the transmembrane receptor.

293. The method of claim 292, wherein the one or more LNP comprises:
a first plurality of LNP encapsulating the RNA-guided nuclease or a nucleic acid encoding an RNA-guided nuclease; and
a second plurality of LNP encapsulating the at least one guide RNA or a nucleic acid encoding at least one guide RNA.

294. The method of claim 292, wherein the one or more LNP comprises a plurality of LNP encapsulating both the (i) RNA-guided nuclease or a nucleic acid encoding an RNA-guided nuclease, and (ii) at least one guide RNA or a nucleic acid encoding at least one guide RNA targeting a gene encoding the transmembrane receptor.

295. The method of any one of claims 292-294, wherein the one or more LNP comprises a component selected from the group consisting of 3-(didodecylamino)-N1,N1,4-tridodecyl-1-piperazineethanamine (KL10), N1-[2-(didodecylamino)ethyl]-N1,N4,N4-tridodecyl-1,4-piperazinediethanamine (KL22), 14,25-ditridecyl-15,18,21,24-tetraaza-octatriacontane (KL25), 1,2-dilinoleyloxy-N,N-dimethylaminopropane (DLin-DMA), 2,2-dilinoleyl-4-dimethylaminomethyl-[1,3]-dioxolane (DLin-K-DMA), heptatriaconta-6,9,28,31-tetraen-19-yl 4-(dimethylamino) butanoate (DLin-MC3-DMA), 2,2-dilinoleyl-4-(2-dimethylaminoethyl)-[1,3]-dioxolane (DLin-KC2-DMA), 1,2-dioleyloxy-N,N-dimethylaminopropane (DODMA), 2-({8-[(3.beta.)-cholest-5-en-3-yloxy]octyl}oxy)-N,N-dimethyl-3-[(9Z,12Z)--octadeca-9,12-dien-1-yloxy]propan-1-amine (Octyl-CLinDMA), (2R)-2-({8-[(3.beta.)-cholest-5-en-3-yloxy]octyl}oxy)-N,N-dimethyl-3-[(9Z-,12Z)-octadeca-9,12-dien-1-yloxy]propan-1-amine (Octyl-CLinDMA (2R)), (2S)-2-({8-[(3.beta.)-cholest-5-en-3-yloxy]octyl}oxy)-N,N-dimethyl-3-[(9Z-,12Z)-octadeca-9,12-dien-1-yloxy]propan-1-amine (Octyl-CLinDMA (2S)), a lipid including a cyclic amine group, and a mixture thereof.

296. The method of any one of claims 292-295, wherein the LNP comprises a component selected from the group consisting of 1,2-dilinoleoyl-sn-glycero-3-phosphocholine (DLPC), 1,2-dimyristoyl-sn-glycero-phosphocholine (DMPC), 1,2-dioleoyl-sn-glycero-3-phosphocholine (DOPC), 1,2-dipalmitoyl-sn-glycero-3-phosphocholine (DPPC), 1,2-distearoyl-sn-glycero-3-phosphocholine (DSPC), 1,2-diundecanoyl-sn-glycero-phosphocholine (DUPC), 1-palmitoyl-2-oleoyl-sn-glycero-3-phosphocholine (POPC), 1,2-di-O-octadecenyl-sn-glycero-3-phosphocholine (18:0 Diether PC), 1-oleoyl-2-cholesterylhemisuccinoyl-sn-glycero-3-phosphocholine (OChemsPC), 1-hexadecyl-sn-glycero-3-phosphocholine (C16 Lyso PC), 1,2-dilinolenoyl-sn-glycero-3-phosphocholine, 1,2-diarachidonoyl-sn-glycero-3-phosphocholine, 1,2-didocosahexaenoyl-sn-glycero-3-phosphocholine, 1,2-dioleoyl-sn-glycero-3-phosphoethanolamine (DOPE), 1,2-diphytanoyl-sn-glycero-3-phosphoethanolamine (ME 16.0 PE), 1,2-distearoyl-sn-glycero-3-phosphoethanolamine, 1,2-dilinoleoyl-sn-glycero-3-phosphoethanolamine, 1,2-dilinolenoyl-sn-glycero-3-phosphoethanolamine, 1,2-diarachidonoyl-sn-glycero-3-phosphoethanolamine, 1,2-didocosahexaenoyl-sn-glycero-3-phosphoethanolamine, 1,2-dioleoyl-sn-glycero-3-phospho-rac-(1-glycerol) sodium salt (DOPG), sphingomyelin (SM), and a mixture thereof.

297. The method of any one of claims 292-296, wherein the LNP comprises a component selected from the group consisting of PEG-modified phosphatidylethanolamines, PEG-modified phosphatidic acids, PEG-modified ceramides, PEG-modified dialkylamines, PEG-modified diacylglycerols, PEG-modified dialkylglycerols, and mixtures thereof. For example, a PEG lipid may be PEG-c-DOMG, PEG-DMG, PEG-DLPE, PEG-DMPE, PEG-DPPC, PEG-DMA, a PEG-DSPE lipid, and a mixture thereof.

298. The method of any one of claims 96-100, wherein the LNP comprises a component selected from the group consisting of a cholesterol, fecosterol, stigmasterol, stigmastanol, sitosterol, β-sitosterol, lupeol, betulin, ursolic acid, oleanolic acid, campesterol, fucosterol, brassicasterol, ergosterol, 9,11-dehydroergosterol, tomatidine, tomatine, α-tocopherol, and a mixture thereof.

299. The method of any one of claims 114-286, wherein the composition comprises one or more liposomes collectively comprising the (i) RNA-guided nuclease or a nucleic acid encoding an RNA-guided nuclease, and (ii) at least one guide RNA or a nucleic acid encoding at least one guide RNA targeting a gene encoding the transmembrane receptor.

300. The method of claim 299, wherein the one or more liposomes comprises:
a first plurality of liposomes encapsulating the RNA-guided nuclease or a nucleic acid encoding an RNA-guided nuclease; and
a second plurality of liposomes encapsulating the at least one guide RNA or a nucleic acid encoding at least one guide RNA.

301. The method of claim 299, wherein the one or more liposomes comprises a plurality of liposomes encapsulating both the (i) RNA-guided nuclease or a nucleic acid encoding an RNA-guided nuclease, and (ii) at least one guide RNA or a nucleic acid encoding at least one guide RNA targeting a gene encoding the transmembrane receptor.

302. The method of any one of claims 114-286, wherein the composition comprises one or more virus-like particles collectively comprising the (i) RNA-guided nuclease or a nucleic acid encoding an RNA-guided nuclease, and (ii) at least one guide RNA or a nucleic acid encoding at least one guide RNA targeting a gene encoding the transmembrane receptor.

303. The method of claim 302, wherein the one or more virus-like particles comprises:
a first plurality of virus-like particles encapsulating the RNA-guided nuclease or a nucleic acid encoding an RNA-guided nuclease; and
a second plurality of virus-like particles encapsulating the at least one guide RNA or a nucleic acid encoding at least one guide RNA.

304. The method of claim 302, wherein the one or more virus-like particles comprises a plurality of virus-like particles encapsulating both the (i) RNA-guided nuclease or a nucleic acid encoding an RNA-guided nuclease, and (ii) at least one guide RNA or a nucleic acid encoding at least one guide RNA targeting a gene encoding the transmembrane receptor.

305. The method of any one of claims 114-304, wherein the composition is formulated for parenteral administration.

306. The method of any one of claims 114-304, wherein the composition is formulated for intra-articular injection within a joint of the subject.

307. The method of any one of claims 114-304, wherein the composition is formulated for intradiscal injection.

308. The method of any one of claims 114-304, wherein the composition is formulated for peridiscal injection.

309. The method of any one of claims 114-304, wherein the composition is formulated for intravertebral injection.

310. The method of any one of claims 114-304, wherein the administering comprises parenteral administration.

311. The method of any one of claims 114-304, wherein the administering comprises intra-articular injection within a joint of the subject.

312. The method of any one of claims 114-304, wherein the administering comprises intradiscal injection.

313. The method of any one of claims 114-304, wherein the administering comprises peridiscal injection.

314. The method of any one of claims 114-304, wherein the administering comprises intravertebral injection.

315. The method of any one of claims 114-304, wherein the administering comprises intra-articular injection of the pharmaceutical composition into the joint of the subject.

316. The method of any one of claims 114-315, wherein the pharmaceutical composition is administered during surgery.

317. The method of any one of claims 114-316, wherein the pharmaceutical composition is administered after surgery.

318. The method of any one of claims 114-317, wherein the pharmaceutical composition is a controlled release pharmaceutical composition.
